(19) United States
(12) Patent Application Publication
(10) Pub. No.: US 2023/0416748 A1
(43) Pub. Date: Dec. 28, 2023

(54) KETOHEXOKINASE (KHK) iRNA COMPOSITIONS AND METHODS OF USE THEREOF

(71) Applicant: Alnylam Pharmaceuticals, Inc., Cambridge, MA (US)

(72) Inventors: Frederic Tremblay, Boston, MA (US); James D. McIninch, Burlington, MA (US)

(21) Appl. No.: 17/900,921

(22) Filed: Sep. 1, 2022

Related U.S. Application Data
(63) Continuation of application No. PCT/US2021/020983, filed on Mar. 5, 2021.
(60) Provisional application No. 62/985,948, filed on Mar. 6, 2020.

(51) Int. Cl. C12N 15/113; A61P 1/16

(52) U.S. Cl. CPC C12N 15/1137; C12N 2310/3519; C12N 2310/14; A61P 1/16

(57) ABSTRACT

The present invention relates to RNAi agents, e.g., dsRNA agents, targeting the ketohexokinase (KHK) gene. The invention also relates to methods of using such RNAi agents to inhibit expression of a KHK gene and to methods of treating or preventing a KHK-associated disease in a subject.

### RELATED APPLICATIONS

[0001] This application is a 35 § U.S.C. 111(a) continuation application which claims the benefit of priority to PCT/US2021/020983, filed on Mar. 5, 2021, which claims the benefit of priority to U.S. Provisional Application No. 62/985,948, filed on Mar. 6, 2020. The entire contents of each of the foregoing applications are incorporated herein by reference.

### SEQUENCE LISTING

[0002] The instant application contains a Sequence Listing which has been submitted electronically in XML file format and is hereby incorporated by reference in its entirety. Said XML copy, created on Apr. 25, 2023, is named 121301-10102_SL.xml and is 4,380,499 bytes in size.

### BACKGROUND OF THE INVENTION

[0003] Epidemiological studies have shown that a western diet is one of the leading causes of the modern obesity pandemic. Increase in fructose uptake, associated with the use of enriched soft drinks and processed food are proposed to be major contributing factors to the epidemic. High fructose corn sweeteners started gaining widespread use in the food industry by 1967. Although glucose and fructose have the same caloric value per molecule, the two sugars are metabolized differently and utilize different GLUT transporters. Fructose is almost exclusively metabolized in the liver, and unlike the glucose metabolism pathway, the fructose metabolism pathway is not regulated by feedback inhibition by the product (Khaitan Z et al., (2013) J. Nutr. Metab. 2013, Article ID 682673, 1-12). While hexokinase and phosphofructokinase (PFK) regulate the production of glyceraldehyde-3-P from glucose, fructokinase or ketohexokinase (KHK), which is responsible for phosphorylation of fructose to fructose-1-phosphate in the liver, is not down regulated by increasing concentrations of fructose-1-phosphate. As a result, all fructose entering the cell is rapidly phosphorylated. (Cirillo P. et al., (2009) J. Am. Soc. Nephrol. 20: 545-553). Continued utilization of ATP to phosphorylate the fructose to fructose-1-phosphate results in intracellular phosphate depletion, ATP depletion, activation of AMP deaminase and formation of uric acid (Khaitan Z. et al., (2013) J. Nutr. Metab. Article ID 682673, 1-12). Increased uric acid further stimulates the up-regulation of KHK (Lanaspa M. A. et al., (2012) PLOS ONE 7(10): 1-11) and causes endothelial cell and adipocyte dysfunction. Fructose-1-phosphate is subsequently converted to glyceraldehyde by the action of aldolase B and is phosphorylated to glyceraldehyde-3-phosphate. The latter proceeds downstream to the glycolysis pathway to form pyruvate, which enters the citric acid cycle, wherefrom, under well-fed conditions, citrate is exported to the cytosol from the mitochondria, providing Acetyl Coenzyme A for lipogenesis (FIG. 1).

[0004] The phosphorylation of fructose by KHK, and subsequent activation of lipogenesis leads to, for example, fatty liver, hypertriglyceridemia, dyslipidemia, and insulin resistance. Proinflammatory changes in renal proximal tubular cells have also been shown to be induced by KHK activity (Cirillo P. et al., (2009) J. Am. Soc. Nephrol. 20: 545-553). The phosphorylation of fructose by KHK is associated with diseases, disorders or conditions such as liver disease (e.g., fatty liver, steatohepatitis), dyslipidemia (e.g., hyperlipidemia, high LDL cholesterol, low HDL cholesterol, hypertriglyceridemia, postprandial hypertriglyceridemia), disorders of glycemic control (e.g., insulin resistance, type 2 diabetes), cardiovascular disease (e.g., hypertension, endothelial cell dysfunction), kidney disease (e.g., acute kidney disorder, tubular dysfunction, proinflammatory changes to the proximal tubules, chronic kidney disease), metabolic syndrome, adipocyte dysfunction, visceral adipose deposition, obesity, hyperuricemia, gout, eating disorders, and excessive sugar craving.

[0005] Accordingly, there is a need in the art for compositions and methods for treating diseases, disorders, and conditions associated with KHK activity.

### SUMMARY OF THE INVENTION

[0006] The present invention provides iRNA compositions which affect the RNA-induced silencing complex (RISC)-mediated cleavage of RNA transcripts of a gene encoding ketohexokinase (KHK). The ketohexokinase (KHK) may be within a cell, e.g., a cell within a subject, such as a human subject.

[0007] In an aspect, the invention provides a double stranded ribonucleic acid (dsRNA) agent for inhibiting expression of ketohexokinase in a cell, wherein the dsRNA agent comprises a sense strand and an antisense strand forming a double stranded region, wherein the sense strand comprises at least 15 contiguous nucleotides differing by no more than 0, 1, 2, or 3 nucleotides from the nucleotide sequence of SEQ ID NO:1 and the antisense strand comprises at least 15 contiguous nucleotides differing by no more than 1, 2, or 3 nucleotides from the nucleotide sequence of SEQ ID NO:2.

[0008] In another aspect, the present invention provides a double stranded ribonucleic acid (dsRNA) for inhibiting expression of ketohexokinase in a cell, wherein said dsRNA comprises a sense strand and an antisense strand forming a double stranded region, wherein the antisense strand comprises a region of complementarity to an mRNA encoding ketohexokinase, and wherein the region of complementarity comprises at least 15 contiguous nucleotides differing by no more than 0, 1, 2, or 3 nucleotides from any one of the antisense nucleotide sequences in any one of Tables 2-5.

[0009] In one aspect, the present invention provides a double stranded ribonucleic acid (dsRNA) for inhibiting expression of ketohexokinase in a cell, wherein said dsRNA comprises a sense strand and an antisense strand forming a double stranded region, wherein the sense strand comprises at least 15 contiguous nucleotides differing by no more than 0, 1, 2, or 3 nucleotides from any one of the nucleotide sequence of nucleotides 943-965; 788-810; 734-756; 1016-1038; 1013-1035; 1207-1229; 1149-1171; 574-596; 1207-1229 or 828-850 of the nucleotide sequence of SEQ ID NO:1, and the antisense strand comprises at least 19 contiguous nucleotides from the corresponding nucleotide sequence of SEQ ID NO:2.

[0010] In one embodiment, the antisense strand comprises at least 15 contiguous nucleotides differing by nor more than 0, 1, 2, or 3 nucleotides from any one of the antisense strand nucleotide sequences of a duplex selected from the group consisting of AD-252498.1, AD-252339.1, AD-252285.1, AD-252531.1, AD-254265.1, AD-254403.1, AD-252627.1, AD-252146.1, AD-252666.1 and AD-252379.1.

[0011] In one embodiment, the dsRNA agent comprises at least one modified nucleotide.

[0012] In one embodiment, substantially all of the nucleotides of the sense strand; substantially all of the nucleotides of the antisense strand comprise a modification; or substantially all of the nucleotides of the sense strand and substantially all of the nucleotides of the antisense strand comprise a modification.

[0013] In one embodiment, all of the nucleotides of the sense strand comprise a modification; all of the nucleotides of the antisense strand comprise a modification; or all of the nucleotides of the sense strand and all of the nucleotides of the antisense strand comprise a modification.

[0014] In one embodiment, at least one of the modified nucleotides is selected from the group consisting of a deoxy-nucleotide, a 3′-terminal deoxythymidine (dT) nucleotide, a 2′-O-methyl modified nucleotide, a 2′-fluoro modified nucleotide, a 2′-deoxy-modified nucleotide, a locked nucleotide, an unlocked nucleotide, a conformationally restricted nucleotide, a constrained ethyl nucleotide, an abasic nucleotide, a 2′-amino-modified nucleotide, a 2′-O-allyl-modified nucleotide, 2′-C-alkyl-modified nucleotide, 2′-hydroxyl-modified nucleotide, a 2′-methoxyethyl modified nucleotide, a 2′-O-alkyl-modified nucleotide, a morpholino nucleotide, a phosphoramidate, a non-natural base comprising nucleotide, a tetrahydropyran modified nucleotide, a 1,5-anhydrohexitol modified nucleotide, a cyclohexenyl modified nucleotide, a nucleotide comprising a phosphorothioate group, a nucleotide comprising a methylphosphonate group, a nucleotide comprising a 5′-phosphate, a nucleotide comprising a 5′-phosphate mimic, a thermally destabilizing nucleotide, a glycol modified nucleotide (GNA), and a 2-O—(N-methylacetamide) modified nucleotide; and combinations thereof.

[0015] In one embodiment, the modifications on the nucleotides are selected from the group consisting of LNA, glycol nucleic acid (GNA), hexitol nucleic acid (HNA), 2′-methoxyethyl, 2′-O-alkyl, 2′-O-allyl, 2′-C-allyl, 2′-fluoro, 2′-deoxy, 2′-hydroxyl, and glycol; and combinations thereof.

[0016] In one embodiment, at least one of the modified nucleotides is selected from the group consisting of a deoxy-nucleotide, a 2′-O-methyl modified nucleotide, a 2′-fluoro modified nucleotide, a 2′-deoxy-modified nucleotide, a glycol modified nucleotide (GNA), e.g., Ggn, Cgn, Tgn, or Agn, and, a vinyl-phosphonate nucleotide; and combinations thereof.

[0017] In another embodiment, at least one of the modifications on the nucleotides is a thermally destabilizing nucleotide modification.

[0018] In one embodiment, the thermally destabilizing nucleotide modification is selected from the group consisting of an abasic modification; a mismatch with the opposing nucleotide in the duplex; and destabilizing sugar modification, a 2′-deoxy modification, an acyclic nucleotide, an unlocked nucleic acids (UNA), and a glycerol nucleic acid (GNA).

[0019] The double stranded region may be 19-30 nucleotide pairs in length; 19-25 nucleotide pairs in length; 19-23 nucleotide pairs in length; 23-27 nucleotide pairs in length; or 21-23 nucleotide pairs in length.

[0020] In one embodiment, each strand is independently no more than 30 nucleotides in length.

[0021] In one embodiment, the sense strand is 21 nucleotides in length and the antisense strand is 23 nucleotides in length.

[0022] The region of complementarity may be at least 17 nucleotides in length; between 19 and 23 nucleotides in length; or 19 nucleotides in length.

[0023] In one embodiment, at least one strand comprises a 3′ overhang of at least 1 nucleotide. In another embodiment, at least one strand comprises a 3′ overhang of at least 2 nucleotides.

[0024] In one embodiment, the dsRNA agent further comprises a ligand.

[0025] In one embodiment, the ligand is conjugated to the 3′ end of the sense strand of the dsRNA agent.

[0026] In one embodiment, the ligand is an N-acetylgalactosamine (GalNAc) derivative.

[0027] In one embodiment, the ligand is one or more GalNAc derivatives attached through a monovalent, bivalent, or trivalent branched linker.

[0028] In one embodiment, the ligand is

[chemical structure]

[0029] In one embodiment, the dsRNA agent is conjugated to the ligand as shown in the following schematic

[chemical structure]

and, wherein X is O or S.

[0030] In one embodiment, the X is O.

[0031] In one embodiment, the dsRNA agent further comprises at least one phosphorothioate or methylphosphonate internucleotide linkage.

[0032] In one embodiment, the phosphorothioate or methylphosphonate internucleotide linkage is at the 3′-terminus of one strand, e.g., the antisense strand or the sense strand.

[0033] In another embodiment, the phosphorothioate or methylphosphonate internucleotide linkage is at the 5′-terminus of one strand, e.g., the antisense strand or the sense strand.

[0034] In one embodiment, the phosphorothioate or methylphosphonate internucleotide linkage is at the both the 5′- and 3′-terminus of one strand. In one embodiment, the strand is the antisense strand.

[0035] In one embodiment, the base pair at the 1 position of the 5′-end of the antisense strand of the duplex is an AU base pair.

[0036] The present invention also provides cells containing any of the dsRNA agents of the invention and pharmaceutical compositions comprising any of the dsRNA agents of the invention.

[0037] The pharmaceutical composition of the invention may include dsRNA agent in an unbuffered solution, e.g., saline or water, or the pharmaceutical composition of the invention may include the dsRNA agent is in a buffer solution, e.g., a buffer solution comprising acetate, citrate, prolamine, carbonate, or phosphate or any combination thereof; or phosphate buffered saline (PBS).

[0038] In one aspect, the present invention provides a method of inhibiting expression of a ketohexokinase (KHK) gene in a cell. The method includes contacting the cell with any of the dsRNAs of the invention or any of the pharmaceutical compositions of the invention, thereby inhibiting expression of the KHK gene in the cell.

[0039] In one embodiment, the cell is within a subject, e.g., a human subject, e.g., a subject having a ketohexokinase-associated disorder, such as a ketohexokinase-associated disorder selected from the group consisting of liver disease (e.g., fatty liver, steatohepatitis, especially non-alcoholic steatohepatitis (NASH)), dyslipidemia (e.g., hyperlipidemia, high LDL cholesterol, low HDL cholesterol, hypertriglyceridemia, postprandial hypertriglyceridemia), disorders of glycemic control (e.g., insulin resistance, type 2 diabetes), cardiovascular disease (e.g., hypertension, endothelial cell dysfunction), kidney disease (e.g., acute kidney disorder, tubular dysfunction, proinflammatory changes to the proximal tubules, chronic kidney disease), metabolic syndrome, adipocyte dysfunction, visceral adipose deposition, obesity, hyperuricemia, gout, eating disorders, and excessive sugar craving.

[0040] In one embodiment, contacting the cell with the dsRNA agent inhibits the expression of KHK by at least 50%, 60%, 70%, 80%, 90%, or 95%.

[0041] In one embodiment, inhibiting expression of ketohexokinase decreases KHK protein level in serum of the subject by at least 50%, 60%, 70%, 80%, 90%, or 95%.

[0042] In one aspect, the present invention provides a method of treating a subject having a disorder that would benefit from reduction in ketohexokinase (KHK) expression. The method includes administering to the subject a therapeutically effective amount of any of the dsRNAs of the invention or any of the pharmaceutical compositions of the invention, thereby treating the subject having the disorder that would benefit from reduction in KHK expression.

[0043] In another aspect, the present invention provides a method of preventing at least one symptom in a subject having a disorder that would benefit from reduction in ketohexokinase (KHK) expression. The method includes administering to the subject a prophylactically effective amount of any of the dsRNAs of the invention or any of the pharmaceutical compositions of the invention, thereby preventing at least one symptom in the subject having the disorder that would benefit from reduction in KHK expression.

[0044] In certain embodiments, the administration of the dsRNA to the subject causes a decrease in fructose metabolism. In certain embodiments, the administration of the dsRNA causes a decrease in the level of KHK in the subject, especially hepatic KHK, especially KHK-C in a subject with elevated KHK. In certain embodiments, the administration of the dsRNA causes a decrease in fructose metabolism in the subject. In certain embodiments, the administration of the dsRNA causes a decrease in the level of uric acid, e.g., serum uric acid, in a subject with elevated serum uric acid, e.g., elevated serum uric acid associated with gout. In certain embodiments, the administration of the dsRNA causes a normalization of serum lipids, e.g., triglycerides including postprandial triglycerides, LDL, HDL, or cholesterol, in a subject with at least one abnormal serum lipid level. In certain embodiments, the administration of the dsRNA causes a normalization of lipid deposition, e.g., a decrease of lipid deposition in the liver (e.g., decrease of NAFLD or NASH), a decrease of visceral fat deposition, a decrease in body weight. In certain embodiments, the administration of the dsRNA causes a normalization of insulin or glucose response in a subject with abnormal insulin response not related to an immune response to insulin, or abnormal glucose response. In certain embodiments, the administration of the dsRNA results in an improvement of kidney function, or a stoppage or reduction of the rate of loss of kidney function. In certain embodiments, the dsRNA causes a reduction of hypertension, i.e., elevated blood pressure.

[0045] In one embodiment, the disorder is a ketohexokinase (KHK)-associated disorder. In certain embodiments, the KHK-associated disease is a liver disease, e.g., fatty liver disease such as NAFLD or NASH. In certain embodiments, the KHK-associated disease is dyslipidemia, e.g., elevated serum triglycerides, elevated serum LDL, elevated serum cholesterol, lowered serum HDL, postprandial hypertriglyceridemia. In another embodiment, the KHK-associated disease is a disorder of glycemic control, e.g., insulin resistance not resulting from an immune response against insulin, glucose resistance, type 2 diabetes. In certain embodiments, the KHK-associated disease is a cardiovascular disease, e.g., hypertension, endothelial cell dysfunction. In certain embodiments, the KHK-associated disease is a kidney disease, e.g., acute kidney disorder, tubular dysfunction, proinflammatory changes to the proximal tubules, chronic kidney disease. In certain embodiments, the KHK-associated disease is metabolic syndrome. In certain embodiments, the KHK-associated disease is a disease of lipid deposition or dysfunction, e.g., visceral adipose deposition, fatty liver, obesity. In certain embodiments, the KHK-associated disease is a disease of elevated uric acid, e.g., gout, hyperuricemia. In certain embodiments, the KHK-associated disease is an eating disorder such as excessive sugar craving.

[0046] In one embodiment, the subject is human.

[0047] In one embodiment, the dsRNA agent is administered to the subject at a dose of about 0.01 mg/kg to about 50 mg/kg.

[0048] In one embodiment, the dsRNA agent is administered to the subject subcutaneously.

[0049] In one embodiment, the methods of the invention include further determining the level of ketohexokinase in a sample(s) from the subject.

[0050] In one embodiment, the level of ketohexokinase in the subject sample(s) is a ketohexokinase protein level in a blood or serum sample(s).

[0051] In certain embodiments, the methods of the invention further comprise administering to the subject an additional therapeutic agent.

[0052] In certain embodiments, treatments known in the art for the various KHK-associated diseases are used in combination with the RNAi agents of the invention.

[0053] In various embodiments, the methods of the invention further comprise measuring the uric acid level, especially serum uric acid level, in the subject. In various embodiments, the methods of the invention further comprise measuring the urine fructose level in the subject. In various embodiments, the methods of the invention further comprise measuring a serum lipid level in a subject. In certain embodiments, the methods of the invention further include measuring insulin or glucose sensitivity in a subject. In certain embodiments, a decrease in the levels of expression or activity of fructose metabolism indicates that the KHK-associated disease is being treated or prevented.

[0054] The present invention also provides kits comprising any of the dsRNAs of the invention or any of the pharmaceutical compositions of the invention, and optionally, instructions for use.

### BRIEF DESCRIPTION OF THE DRAWINGS

[0055] FIG. 1 depicts the classic and alternative lipogenic pathways of fructose. In the classical pathway, triglycerides (TG) are a direct product of fructose metabolism by the action of multiple enzymes including aldolase B (Aldo B) and fatty acid synthase (FAS). In an alternative pathway, uric acid produced from the nucleotide turnover that occurs during the phosphorylation of fructose to fructose-1-phosphate (F-1-P) results in the generation of mitochondrial oxidative stress (mtROS), which causes a decrease in the activity of aconitase (ACO2) in the Krebs cycle. As a consequence, the ACO2 substrate, citrate, accumulates and is released to the cytosol where it acts as substrate for TG synthesis through the activation of ATP citrate lyase (ACL) and fatty acid synthase. AMPD2, AMP deaminase 2; IMP, inosine monophosphate; PO₄, phosphate (from Johnson et al. (2013) Diabetes. 62:3307-3315).

[0056] FIG. 2 is a graph depicting the level of human KHK mRNA following subcutaneous administration of a single 10 mg/kg dose of the indicated dsRNA agents to mice.

### DETAILED DESCRIPTION OF THE INVENTION

[0057] The present invention provides iRNA compositions which effect the RNA-induced silencing complex (RISC)-mediated cleavage of RNA transcripts of a ketohexokinase (KHK) gene. The gene may be within a cell, e.g., a cell within a subject, such as a human. The use of these iRNAs enables the targeted degradation of mRNAs of the corresponding gene (ketohexokinase gene) in mammals.

[0058] The iRNAs of the invention have been designed to target the human ketohexokinase gene, including portions of the gene that are conserved in the ketohexokinase orthologs of other mammalian species. Without intending to be limited by theory, it is believed that a combination or sub-combination of the foregoing properties and the specific target sites or the specific modifications in these iRNAs confer to the iRNAs of the invention improved efficacy, stability, potency, durability, and safety.

[0059] Accordingly, the present invention provides methods for treating and preventing a ketohexokinase-associated disorder, disease, or conditions, e.g., liver disease (e.g., fatty liver, steatohepatitis, NAFLD, NASH), dyslipidemia (e.g., hyperlipidemia, high LDL cholesterol, low HDL cholesterol, hypertriglyceridemia, postprandial hypertriglyceridemia), disorders of glycemic control (e.g., insulin resistance not due to an immune response to insulin, type 2 diabetes), cardiovascular disease (e.g., hypertension, endothelial cell dysfunction), kidney disease (e.g., acute kidney disorder, tubular dysfunction, proinflammatory changes to the proximal tubules, chronic kidney disease), metabolic syndrome, adipocyte dysfunction, visceral adipose deposition, obesity, hyperuricemia, gout, eating disorders, and excessive sugar craving, using iRNA compositions which effect the RNA-induced silencing complex (RISC)-mediated cleavage of RNA transcripts of a ketohexokinase gene.

[0060] The iRNAs of the invention include an RNA strand (the antisense strand) having a region which is up to about 30 nucleotides or less in length, e.g., 19-30, 19-29, 19-28, 19-27, 19-26, 19-25, 19-24, 19-23, 19-22, 19-21, 19-20, 20-30, 20-29, 20-28, 20-27, 20-26, 20-25, 20-24,20-23, 20-22, 20-21, 21-30, 21-29, 21-28, 21-27, 21-26, 21-25, 21-24, 21-23, or 21-22 nucleotides in length, which region is substantially complementary to at least part of an mRNA transcript of a KHK gene. In certain embodiments, the RNAi agents of the disclosure include an RNA strand (the antisense strand) having a region which is about 21-23 nucleotides in length, which region is substantially complementary to at least part of an mRNA transcript of a KHK gene.

[0061] In certain embodiments, one or both of the strands of the double stranded RNAi agents of the invention is up to 66 nucleotides in length, e.g., 36-66, 26-36, 25-36, 31-60, 22-43, 27-53 nucleotides in length, with a region of at least 19 contiguous nucleotides that is substantially complementary to at least a part of an mRNA transcript of a KHK gene. In some embodiments, such iRNA agents having longer length antisense strands may include a second RNA strand (the sense strand) of 20-60 nucleotides in length wherein the sense and antisense strands form a duplex of 18-30 contiguous nucleotides.

[0062] The use of iRNAs of the invention enables the targeted degradation of mRNAs of the corresponding gene (ketohexokinase gene) in mammals. Using in vitro assays, the present inventors have demonstrated that iRNAs targeting a KHK gene can potently mediate RNAi, resulting in significant inhibition of expression of a KHK gene. Thus, methods and compositions including these iRNAs are useful for treating a subject having a ketohexokinase-associated disorder, e.g., liver disease (e.g., fatty liver, steatohepatitis, NAFLD, NASH), dyslipidemia (e.g., hyperlipidemia, high LDL cholesterol, low HDL cholesterol, hypertriglyceridemia, postprandial hypertriglyceridemia), disorders of glycemic control (e.g., insulin resistance not due to an immune response to insulin, type 2 diabetes), cardiovascular disease (e.g., hypertension, endothelial cell dysfunction), kidney disease (e.g., acute kidney disorder, tubular dysfunction, proinflammatory changes to the proximal tubules, chronic kidney disease), metabolic syndrome, adipocyte dysfunction, visceral adipose deposition, obesity, hyperuricemia, gout, eating disorders, and excessive sugar craving.

[0063] Accordingly, the present invention provides methods and combination therapies for treating a subject having a disorder that would benefit from inhibiting or reducing the expression of a KHK gene, e.g., a ketohexokinase-associated disease, such as liver disease (e.g., fatty liver, steatohepatitis, NAFLD, NASH), dyslipidemia (e.g., hyperlipidemia, high LDL cholesterol, low HDL cholesterol, hypertriglyceridemia, postprandial hypertriglyceridemia), disorders of glycemic control (e.g., insulin resistance not due to an immune response to insulin, type 2 diabetes), cardiovascular disease (e.g., hypertension, endothelial cell dysfunction), kidney disease (e.g., acute kidney disorder, tubular dysfunction, proinflammatory changes to the proximal tubules, chronic kidney disease), metabolic syndrome, adipocyte dysfunction, visceral adipose deposition, obesity, hyperuricemia, gout, eating disorders, and excessive sugar craving, using iRNA compositions which effect the RNA-induced silencing complex (RISC)-mediated cleavage of RNA transcripts of a KHK gene.

[0064] The present invention also provides methods for preventing at least one symptom in a subject having a disorder that would benefit from inhibiting or reducing the expression of a KHK gene, e.g., liver disease (e.g., fatty liver, steatohepatitis, NAFLD, NASH), dyslipidemia (e.g., hyperlipidemia, high LDL cholesterol, low HDL cholesterol, hypertriglyceridemia, postprandial hypertriglyceridemia), disorders of glycemic control (e.g., insulin resistance not due to an immune response to insulin, type 2 diabetes), cardiovascular disease (e.g., hypertension, endothelial cell dysfunction), kidney disease (e.g., acute kidney disorder, tubular dysfunction, proinflammatory changes to the proximal tubules, chronic kidney disease), metabolic syndrome, adipocyte dysfunction, visceral adipose deposition, obesity, hyperuricemia, gout, eating disorders, and excessive sugar craving.

[0065] In certain embodiments, the administration of the dsRNA to the subject causes a decrease in fructose metabolism. In certain embodiments, the administration of the dsRNA causes a decrease in the level of KHK in the subject, especially hepatic KHK, especially KHK-C in a subject with elevated KHK. In certain embodiments, the administration of the dsRNA causes a decrease in fructose metabolism in the subject. In certain embodiments, the administration of the dsRNA causes a decrease in the level of uric acid, e.g., serum uric acid, in a subject with elevated serum uric acid, e.g., elevated serum uric acid associated with gout. In certain embodiments, the administration of the dsRNA causes a normalization of serum lipids, e.g., triglycerides including postprandial triglycerides, LDL, HDL, or cholesterol, in a subject with at least one abnormal serum lipid level. In certain embodiments, the administration of the dsRNA causes a normalization of lipid deposition, e.g., a decrease of lipid deposition in the liver (e.g., decrease of NAFLD or NASH), a decrease of visceral fat deposition, a decrease in body weight. In certain embodiments, the administration of the dsRNA causes a normalization of insulin or glucose response in a subject with abnormal insulin response not related to an immune response to insulin, or abnormal glucose response. In certain embodiments, the administration of the dsRNA results in an improvement of kidney function, or a stoppage or reduction of the rate of loss of kidney function. In certain embodiments, the dsRNA causes a reduction of hypertension, i.e., elevated blood pressure.

[0066] The following detailed description discloses how to make and use compositions containing iRNAs to inhibit the expression of a KHK gene as well as compositions, uses, and methods for treating subjects that would benefit from inhibition and/or reduction of the expression of a KHK gene, e.g., subjects susceptible to or diagnosed with a ketohexokinase-associated disorder.

### I. Definitions

[0067] In order that the present invention may be more readily understood, certain terms are first defined. In addition, it should be noted that whenever a value or range of values of a parameter are recited, it is intended that values and ranges intermediate to the recited values are also intended to be part of this invention.

[0068] The articles “a” and “an” are used herein to refer to one or to more than one (i.e., to at least one) of the grammatical object of the article. By way of example, “an element” means one element or more than one element, e.g., a plurality of elements.

[0069] The term “including” is used herein to mean, and is used interchangeably with, the phrase “including but not limited to”.

[0070] The term “or” is used herein to mean, and is used interchangeably with, the term “and/or,” unless context clearly indicates otherwise. For example, “sense strand or antisense strand” is understood as “sense strand or antisense strand or sense strand and antisense strand.”

[0071] The term “about” is used herein to mean within the typical ranges of tolerances in the art. For example, “about” can be understood as about 2 standard deviations from the mean. In certain embodiments, about means±10%. In certain embodiments, about means±5%. When about is present before a series of numbers or a range, it is understood that “about” can modify each of the numbers in the series or range.

[0072] The term “at least”, “no less than”, or “or more” prior to a number or series of numbers is understood to include the number adjacent to the term “at least”, and all subsequent numbers or integers that could logically be included, as clear from context. For example, the number of nucleotides in a nucleic acid molecule must be an integer. For example, “at least 19 nucleotides of a 21 nucleotide nucleic acid molecule” means that 19, 20, or 21 nucleotides have the indicated property. When at least is present before a series of numbers or a range, it is understood that “at least” can modify each of the numbers in the series or range.

[0073] As used herein, “no more than” or “less than” is understood as the value adjacent to the phrase and logical lower values or integers, as logical from context, to zero. For example, a duplex with an overhang of “no more than 2 nucleotides” has a 2, 1, or 0 nucleotide overhang. When “no more than” is present before a series of numbers or a range, it is understood that “no more than” can modify each of the numbers in the series or range. As used herein, ranges include both the upper and lower limit.

[0074] As used herein, methods of detection can include determination that the amount of analyte present is below the level of detection of the method.

[0075] In the event of a conflict between an indicated target site and the nucleotide sequence for a sense or antisense strand, the indicated sequence takes precedence.

[0076] In the event of a conflict between a sequence and its indicated site on a transcript or other sequence, the nucleotide sequence recited in the specification takes precedence.

[0077] As used herein, the term “KHK” refers to the well-known gene that encodes ketohexokinase, as well as to its protein product.

[0078] The KHK (Ketohexokinase) gene is located on chromosome 2p23 and encodes ketohexokinase, also known as fructokinase. KHK is a phosphotransferase enzyme with an alcohol as the phosphate acceptor. KHK belongs to the ribokinase family of carbohydrate kinases (Trinh et al., ACTA Cryst., D65: 201-211). Two isoforms of ketohexokinase have been identified, KHK-A (various a) and KHK-C (various b), that result from alternative splicing of the full length mRNA. KHK-C mRNA is expressed at high levels, predominantly in the liver, kidney and small intestine. KHK-C has a much lower Kₘ for fructose binding that KHK-A, and as a result, is highly effective in phosphorylating dietary fructose.

[0079] The sequence of a human KHK mRNA transcript may be found at, for example, GenBank Accession No. GI: 1370477611 (variant 10, XM_017004061.1; SEQ ID NO: 1; reverse complement, SEQ ID NO: 2).

[0080] The sequence of a human KHK mRNA transcript may be found at, for example, GenBank Accession No. GI: 1370477602 (variant 1, XM_006712008.4; SEQ ID NO: 3; reverse complement, SEQ ID NO: 4).

[0081] The sequence of a human KHK mRNA transcript may be found at, for example, GenBank Accession No. GI: 1370477603 (variant 2, XM_006712009.4; SEQ ID NO: 5; reverse complement, SEQ ID NO: 6).

[0082] The sequence of a human KHK mRNA transcript may be found at, for example, GenBank Accession No. GI: 1370477604 (variant 3, XM_005264294.4; SEQ ID NO: 7; reverse complement, SEQ ID NO: 8).

[0083] The sequence of a human KHK mRNA transcript may be found at, for example, GenBank Accession No. GI: 1370477605 (variant 4, XM_017004060.2; SEQ ID NO: 9; reverse complement, SEQ ID NO: 10).

[0084] The sequence of a human KHK mRNA transcript may be found at, for example, GenBank Accession No. GI: 1370477606 (variant 5, XM_006712010.4; SEQ ID NO: 11; reverse complement, SEQ ID NO: 12).

[0085] The sequence of a human KHK mRNA transcript may be found at, for example, GenBank Accession No. GI: 1370477607 (variant 6, XM_006712011.4; SEQ ID NO: 13; reverse complement, SEQ ID NO: 14).

[0086] The sequence of a human KHK mRNA transcript may be found at, for example, GenBank Accession No. GI: 1370477608 (variant 7, XM_006712012.4; SEQ ID NO: 15; reverse complement, SEQ ID NO: 16).

[0087] The sequence of a human KHK mRNA transcript may be found at, for example, GenBank Accession No. GI: 1370477609 (variant 8, XM_005264296.4; SEQ ID NO: 17; reverse complement, SEQ ID NO: 18).

[0088] The sequence of a human KHK mRNA transcript may be found at, for example, GenBank Accession No. GI: 1370477610 (variant 9, XM_006712013.4; SEQ ID NO: 19; reverse complement, SEQ ID NO: 20).

[0089] The sequence of a human KHK mRNA transcript may be found at, for example, GenBank Accession No. GI: 1370477612 (variant 11, XM_006712014.4; SEQ ID NO: 21; reverse complement, SEQ ID NO: 22).

[0090] The sequence of a human KHK mRNA transcript may be found at, for example, GenBank Accession No. GI: 1370477613 (variant 12, XM_005264298.4; SEQ ID NO: 23; reverse complement, SEQ ID NO: 24).

[0091] The sequence of a human KHK-C mRNA transcript may be found at, for example, GenBank Accession No. GI: 1519473652 (variant b, NM_006488.3; SEQ ID NO:25; reverse complement, SEQ ID NO: 26).

[0092] The sequence of a human KHK-A mRNA transcript may be found at, for example GenBank Accession No. GI: 1676318137 (variant a, NM_000221.3; SEQ ID NO:27; reverse complement, SEQ ID NO: 28).

[0093] The sequence of a mouse (Mus musculus) KHK mRNA transcript may be found at, for example, GenBank Accession No. GI: 887229617 (variant 1, NM_001310524.1; SEQ ID NO:29; reverse complement, SEQ ID NO: 30).

[0094] The sequence of a rat (Rattus norvegicus) KHK mRNA transcript may be found at, for example GenBank Accession No. GI: 126432547 (NM_031855.3; SEQ ID NO:31; reverse complement, SEQ ID NO: 32).

[0095] The sequence of a rabbit (Oryctolagus cuniculus) KHK mRNA transcript may be found at, for example GenBank Accession No. GI: 1040208599 (variant 2, XM_017340872.1; SEQ ID NO:33; reverse complement, SEQ ID NO: 34).

[0096] The sequence of a Macaca mulatta KHK mRNA transcript may be found at, for example GenBank Accession No. GI: 1622855994 (variant 1, XM_015111942.2; SEQ ID NO:35; reverse complement, SEQ ID NO: 36).

[0097] Further information on KHK can be found, for example, at www.ncbi.nlm.nih.gov/gene/3795.

[0098] Additional examples of KHK mRNA sequences are readily available through publicly available databases, e.g., GenBank, UniProt, OMIM, and the Macaca genome project web site.

[0099] The term “KHK,” as used herein, also refers to naturally occurring DNA sequence variations of the KHK gene, such as a single nucleotide polymorphism (SNP) in the KHK gene. Exemplary SNPs in the KHK DNA sequence may be found through the dbSNP database available at www.ncbi.nlm.nih.gov/projects/SNP/.

[0100] Exemplary KHK nucleotide sequences may also be found in SEQ ID NOs:1-36. SEQ ID NOs:2, 4, 6, 8, 10, 12, 14, 16, 18, 20, 22, 24, 26, 28, 30, 32, 34 and 36 are the reverse complement sequences of SEQ ID NOs:1, 3, 5, 7, 9, 11, 13, 15, 17, 19, 21, 23, 25, 27, 29, 31, 33 and 35 respectively.

[0101] The entire contents of each of the foregoing GenBank Accession numbers and the Gene database numbers are incorporated herein by reference as of the date of filing this application.

[0102] As used herein, “target sequence” refers to a contiguous portion of the nucleotide sequence of an mRNA molecule formed during the transcription of a ketohexokinase gene, including mRNA that is a product of RNA processing of a primary transcription product. The target portion of the sequence will be at least long enough to serve as a substrate for iRNA-directed cleavage at or near that portion of the nucleotide sequence of an mRNA molecule formed during the transcription of a KHK gene. In one embodiment, the target sequence is within the protein coding region of KHK.

[0103] The target sequence may be from about 19-36 nucleotides in length, e.g., about 19-30 nucleotides in length. For example, the target sequence can be about 19-30 nucleotides, 19-30, 19-29, 19-28, 19-27, 19-26, 19-25, 19-24, 19-23, 19-22, 19-21, 19-20, 20-30, 20-29, 20-28, 20-27, 20-26, 20-25, 20-24, 20-23, 20-22, 20-21, 21-30, 21-29, 21-28, 21-27, 21-26, 21-25, 21-24, 21-23, or 21-22 nucleotides in length. In some embodiments, the target sequence is about 19 to about 30 nucleotides in length. In other embodiments, the target sequence is about 19 to about 25 nucleotides in length. In still other embodiments, the target sequence is about 19 to about 23 nucleotides in length. In some embodiments, the target sequence is about 21 to about 23 nucleotides in length. Ranges and lengths intermediate to the above recited ranges and lengths are also contemplated to be part of the invention.

[0104] As used herein, the term “strand comprising a sequence” refers to an oligonucleotide comprising a chain of nucleotides that is described by the sequence referred to using the standard nucleotide nomenclature.

[0105] “G,” “C,” “A,” “T,” and “U” each generally stand for a nucleotide that contains guanine, cytosine, adenine, thymidine, and uracil as a base, respectively. However, it will be understood that the term “ribonucleotide” or “nucleotide” can also refer to a modified nucleotide, as further detailed below, or a surrogate replacement moiety (see, e.g., Table 1). The skilled person is well aware that guanine, cytosine, adenine, and uracil can be replaced by other moieties without substantially altering the base pairing properties of an oligonucleotide comprising a nucleotide bearing such replacement moiety. For example, without limitation, a nucleotide comprising inosine as its base can base pair with nucleotides containing adenine, cytosine, or uracil. Hence, nucleotides containing uracil, guanine, or adenine can be replaced in the nucleotide sequences of dsRNA featured in the invention by a nucleotide containing, for example, inosine. In another example, adenine and cytosine anywhere in the oligonucleotide can be replaced with guanine and uracil, respectively to form G-U Wobble base pairing with the target mRNA. Sequences containing such replacement moieties are suitable for the compositions and methods featured in the invention.

[0106] The terms “iRNA”, “RNAi agent,” “iRNA agent,”, “RNA interference agent” as used interchangeably herein, refer to an agent that contains RNA as that term is defined herein, and which mediates the targeted cleavage of an RNA transcript via an RNA-induced silencing complex (RISC) pathway. iRNA directs the sequence-specific degradation of mRNA through a process known as RNA interference (RNAi). The iRNA modulates, e.g., inhibits, the expression of a ketohexokinase gene in a cell, e.g., a cell within a subject, such as a mammalian subject.

[0107] In one embodiment, an RNAi agent of the invention includes a single stranded RNA that interacts with a target RNA sequence, e.g., a ketohexokinase target mRNA sequence, to direct the cleavage of the target RNA. Without wishing to be bound by theory it is believed that long double stranded RNA introduced into cells is broken down into siRNA by a Type III endonuclease known as Dicer (Sharp et al. (2001) Genes Dev. 15:485). Dicer, a ribonuclease-III-like enzyme, processes the dsRNA into 19-23 base pair short interfering RNAs with characteristic two base 3′ overhangs (Bernstein, et al., (2001) Nature 409:363). The siRNAs are then incorporated into an RNA-induced silencing complex (RISC) where one or more helicases unwind the siRNA duplex, enabling the complementary antisense strand to guide target recognition (Nykanen, et al., (2001) Cell 107:309). Upon binding to the appropriate target mRNA, one or more endonucleases within the RISC cleave the target to induce silencing (Elbashir, et al., (2001) Genes Dev. 15:188). Thus, in one aspect the invention relates to a single stranded RNA (siRNA) generated within a cell and which promotes the formation of a RISC complex to effect silencing of the target gene, i.e., a ketohexokinase (KHK) gene. Accordingly, the term “siRNA” is also used herein to refer to an iRNA as described above.

[0108] In certain embodiments, the RNAi agent may be a single-stranded siRNA (ssRNAi) that is introduced into a cell or organism to inhibit a target mRNA. Single-stranded RNAi agents bind to the RISC endonuclease, Argonaute 2, which then cleaves the target mRNA. The single-stranded siRNAs are generally 15-30 nucleotides and are chemically modified. The design and testing of single-stranded siRNAs are described in U.S. Pat. No. 8,101,348 and in Lima et al., (2012) Cell 150:883-894, the entire contents of each of which are hereby incorporated herein by reference. Any of the antisense nucleotide sequences described herein may be used as a single-stranded siRNA as described herein or as chemically modified by the methods described in Lima et al., (2012) Cell 150:883-894.

[0109] In certain embodiments, an “iRNA” for use in the compositions, uses, and methods of the invention is a double stranded RNA and is referred to herein as a “double stranded RNA agent,” “double stranded RNA (dsRNA) molecule,” “dsRNA agent,” or “dsRNA”. The term “dsRNA”, refers to a complex of ribonucleic acid molecules, having a duplex structure comprising two anti-parallel and substantially complementary nucleic acid strands, referred to as having “sense” and “antisense” orientations with respect to a target RNA, i.e., a ketohexokinase (KHK) gene. In some embodiments of the invention, a double stranded RNA (dsRNA) triggers the degradation of a target RNA, e.g., an mRNA, through a post-transcriptional gene-silencing mechanism referred to herein as RNA interference or RNAi.

[0110] In general, the majority of nucleotides of each strand of a dsRNA molecule are ribonucleotides, but as described in detail herein, each or both strands can also include one or more non-ribonucleotides, e.g., a deoxyribonucleotide or a modified nucleotide. In addition, as used in this specification, an “iRNA” may include ribonucleotides with chemical modifications; an iRNA may include substantial modifications at multiple nucleotides.

[0111] As used herein, the term “modified nucleotide” refers to a nucleotide having, independently, a modified sugar moiety, a modified internucleotide linkage, or modified nucleobase, or any combination thereof. Thus, the term modified nucleotide encompasses substitutions, additions or removal of, e.g., a functional group or atom, to internucleoside linkages, sugar moieties, or nucleobases. The modifications suitable for use in the agents of the invention include all types of modifications disclosed herein or known in the art. Any such modifications, as used in a siRNA type molecule, are encompassed by “iRNA” or “RNAi agent” for the purposes of this specification and claims.

[0112] In certain embodiments of the instant disclosure, inclusion of a deoxy-nucleotide—which is acknowledged as a naturally occurring form of nucleotide—if present within a RNAi agent can be considered to constitute a modified nucleotide.

[0113] The duplex region may be of any length that permits specific degradation of a desired target RNA through a RISC pathway, and may range from about 19 to 36 base pairs in length, e.g., about 19-30 base pairs in length, for example, about 9, 10, 11, 12, 13, 14, 15, 16, 17, 18, 19, 20, 21, 22, 23, 24, 25, 26, 27, 28, 29, 30, 31, 32, 33, 34, 35, or 36 base pairs in length, such as about 19-30, 19-29, 19-28, 19-27, 19-26, 19-25, 19-24, 19-23, 19-22, 19-21, 19-20, 20-30, 20-29, 20-28, 20-27, 20-26, 20-25, 20-24,20-23, 20-22, 20-21, 21-30, 21-29, 21-28, 21-27, 21-26, 21-25, 21-24, 21-23, or 21-22 base pairs in length. In certain embodiments, the duplex region is 19-21 base pairs in length, e.g., 21 base pairs in length. Ranges and lengths intermediate to the above recited ranges and lengths are also contemplated to be part of the disclosure.

[0114] The two strands forming the duplex structure may be different portions of one larger RNA molecule, or they may be separate RNA molecules. Where the two strands are part of one larger molecule, and therefore are connected by an uninterrupted chain of nucleotides between the 3′-end of one strand and the 5′-end of the respective other strand forming the duplex structure, the connecting RNA chain is referred to as a “hairpin loop.” A hairpin loop can comprise at least one unpaired nucleotide. In some embodiments, the hairpin loop can comprise at least 2, 3, 4, 5, 6, 7, 8, 9, 10, 20, 23 or more unpaired nucleotides. In some embodiments, the hairpin loop can be 10 or fewer nucleotides. In some embodiments, the hairpin loop can be 8 or fewer unpaired nucleotides. In some embodiments, the hairpin loop can be 4-10 unpaired nucleotides. In some embodiments, the hairpin loop can be 4-8 nucleotides.

[0115] In certain embodiment, the two strands of double-stranded oligomeric compound can be linked together. The two strands can be linked to each other at both ends, or at one end only. By linking at one end is meant that 5′-end of first strand is linked to the 3′-end of the second strand or 3′-end of first strand is linked to 5′-end of the second strand. When the two strands are linked to each other at both ends, 5′-end of first strand is linked to 3′-end of second strand and 3′-end of first strand is linked to 5′-end of second strand. The two strands can be linked together by an oligonucleotide linker including, but not limited to, (N)n; wherein N is independently a modified or unmodified nucleotide and n is 3-23. In some embodiments, n is 3-10, e.g., 3, 4, 5, 6, 7, 8, 9, or 10. In some embodiments, the oligonucleotide linker is selected from the group consisting of GNRA, (G)4, (U)4, and (dT)4, wherein N is a modified or unmodified nucleotide and R is a modified or unmodified purine nucleotide. Some of the nucleotides in the linker can be involved in base-pair interactions with other nucleotides in the linker. The two strands can also be linked together by a non-nucleosidic linker, e.g. a linker described herein. It will be appreciated by one of skill in the art that any oligonucleotide chemical modifications or variations describe herein can be used in the oligonucleotide linker.

[0116] Hairpin and dumbbell type oligomeric compounds will have a duplex region equal to or at least 14, 15, 15, 16, 17, 18, 19, 29, 21, 22, 23, 24, or 25 nucleotide pairs. The duplex region can be equal to or less than 200, 100, or 50, in length. In some embodiments, ranges for the duplex region are 15-30, 17 to 23, 19 to 23, and 19 to 21 nucleotides pairs in length.

[0117] The hairpin oligomeric compounds can have a single strand overhang or terminal unpaired region, in some embodiments at the 3′, and in some embodiments on the antisense side of the hairpin. In some embodiments, the overhangs are 1-4, more generally 2-3 nucleotides in length. The hairpin oligomeric compounds that can induce RNA interference are also referred to as “shRNA” herein.

[0118] Where the two substantially complementary strands of a dsRNA are comprised by separate RNA molecules, those molecules need not be, but can be covalently connected. Where the two strands are connected covalently by means other than an uninterrupted chain of nucleotides between the 3′-end of one strand and the 5′-end of the respective other strand forming the duplex structure, the connecting structure is referred to as a “linker.” The RNA strands may have the same or a different number of nucleotides. The maximum number of base pairs is the number of nucleotides in the shortest strand of the dsRNA minus any overhangs that are present in the duplex. In addition to the duplex structure, an RNAi may comprise one or more nucleotide overhangs. In one embodiment of the RNAi agent, at least one strand comprises a 3′ overhang of at least 1 nucleotide. In another embodiment, at least one strand comprises a 3′ overhang of at least 2 nucleotides, e.g., 2, 3, 4, 5, 6, 7, 9, 10, 11, 12, 13, 14, or 15 nucleotides. In other embodiments, at least one strand of the RNAi agent comprises a 5′ overhang of at least 1 nucleotide. In certain embodiments, at least one strand comprises a 5′ overhang of at least 2 nucleotides, e.g., 2, 3, 4, 5, 6, 7, 9, 10, 11, 12, 13, 14, or 15 nucleotides. In still other embodiments, both the 3′ and the 5′ end of one strand of the RNAi agent comprise an overhang of at least 1 nucleotide.

[0119] In certain embodiments, an iRNA agent of the invention is a dsRNA, each strand of which comprises 19-23 nucleotides, that interacts with a target RNA sequence, e.g., a ketohexokinase (KHK) gene, to direct cleavage of the target RNA.

[0120] In some embodiments, an iRNA of the invention is a dsRNA of 24-30 nucleotides that interacts with a target RNA sequence, e.g., a KHK target mRNA sequence, to direct the cleavage of the target RNA.

[0121] As used herein, the term “nucleotide overhang” refers to at least one unpaired nucleotide that protrudes from the duplex structure of a double stranded iRNA. For example, when a 3′-end of one strand of a dsRNA extends beyond the 5′-end of the other strand, or vice versa, there is a nucleotide overhang. A dsRNA can comprise an overhang of at least one nucleotide; alternatively the overhang can comprise at least two nucleotides, at least three nucleotides, at least four nucleotides, at least five nucleotides or more. A nucleotide overhang can comprise or consist of a nucleotide/nucleoside analog, including a deoxynucleotide/nucleoside. The overhang(s) can be on the sense strand, the antisense strand, or any combination thereof. Furthermore, the nucleotide(s) of an overhang can be present on the 5′-end, 3′-end, or both ends of either an antisense or sense strand of a dsRNA.

[0122] In one embodiment of the dsRNA, at least one strand comprises a 3′ overhang of at least 1 nucleotide. In another embodiment, at least one strand comprises a 3′ overhang of at least 2 nucleotides, e.g., 2, 3, 4, 5, 6, 7, 9, 10, 11, 12, 13, 14, or 15 nucleotides. In other embodiments, at least one strand of the RNAi agent comprises a 5′ overhang of at least 1 nucleotide. In certain embodiments, at least one strand comprises a 5′ overhang of at least 2 nucleotides, e.g., 2, 3, 4, 5, 6, 7, 9, 10, 11, 12, 13, 14, or 15 nucleotides. In still other embodiments, both the 3′ and the 5′ end of one strand of the RNAi agent comprise an overhang of at least 1 nucleotide.

[0123] In one embodiment, the antisense strand of a dsRNA has a 1-10 nucleotide, e.g., a 1, 2, 3, 4, 5, 6, 7, 8, 9, or 10 nucleotide, overhang at the 3′-end or the 5′-end. In one embodiment, the sense strand of a dsRNA has a 1-10 nucleotide, e.g., a 1, 2, 3, 4, 5, 6, 7, 8, 9, or 10 nucleotide, overhang at the 3′-end or the 5′-end. In another embodiment, one or more of the nucleotides in the overhang is replaced with a nucleoside thiophosphate.

[0124] In certain embodiments, the antisense strand of a dsRNA has a 1-10 nucleotides, e.g., a 1, 2, 3, 4, 5, 6, 7, 8, 9, or 10 nucleotide, overhang at the 3′-end or the 5′-end. In certain embodiments, the overhang on the sense strand or the antisense strand, or both, can include extended lengths longer than 10 nucleotides, e.g., 1-30 nucleotides, 2-30 nucleotides, 10-30 nucleotides, 10-25 nucleotides, 10-20 nucleotides, or 10-15 nucleotides in length. In certain embodiments, an extended overhang is on the sense strand of the duplex. In certain embodiments, an extended overhang is present on the 3′ end of the sense strand of the duplex. In certain embodiments, an extended overhang is present on the 5′ end of the sense strand of the duplex. In certain embodiments, an extended overhang is on the antisense strand of the duplex. In certain embodiments, an extended overhang is present on the 3′end of the antisense strand of the duplex. In certain embodiments, an extended overhang is present on the 5′end of the antisense strand of the duplex. In certain embodiments, one or more of the nucleotides in the extended overhang is replaced with a nucleoside thiophosphate. In certain embodiments, the overhang includes a self-complementary portion such that the overhang is capable of forming a hairpin structure that is stable under physiological conditions.

[0125] “Blunt” or “blunt end” means that there are no unpaired nucleotides at that end of the double stranded RNA agent, i.e., no nucleotide overhang. A “blunt ended” double stranded RNA agent is double stranded over its entire length, i.e., no nucleotide overhang at either end of the molecule. The RNAi agents of the invention include RNAi agents with no nucleotide overhang at one end (i.e., agents with one overhang and one blunt end) or with no nucleotide overhangs at either end. Most often such a molecule will be double-stranded over its entire length.

[0126] The term “antisense strand” or “guide strand” refers to the strand of an iRNA, e.g., a dsRNA, which includes a region that is substantially complementary to a target sequence, e.g., a KHK mRNA.

[0127] As used herein, the term “region of complementarity” refers to the region on the antisense strand that is substantially complementary to a sequence, for example a target sequence, e.g., a ketohexokinase nucleotide sequence, as defined herein. Where the region of complementarity is not fully complementary to the target sequence, the mismatches can be in the internal or terminal regions of the molecule. Generally, the most tolerated mismatches are in the terminal regions, e.g., within 5, 4, or 3 nucleotides of the 5′- or 3′-end of the iRNA. In some embodiments, a double stranded RNA agent of the invention includes a nucleotide mismatch in the antisense strand. In some embodiments, the antisense strand of the double stranded RNA agent of the invention includes no more than 4 mismatches with the target mRNA, e.g., the antisense strand includes 4, 3, 2, 1, or 0 mismatches with the target mRNA. In some embodiments, the antisense strand double stranded RNA agent of the invention includes no more than 4 mismatches with the sense strand, e.g., the antisense strand includes 4, 3, 2, 1, or 0 mismatches with the sense strand. In some embodiments, a double stranded RNA agent of the invention includes a nucleotide mismatch in the sense strand. In some embodiments, the sense strand of the double stranded RNA agent of the invention includes no more than 4 mismatches with the antisense strand, e.g., the sense strand includes 4, 3, 2, 1, or 0 mismatches with the antisense strand. In some embodiments, the nucleotide mismatch is, for example, within 5, 4, 3 nucleotides from the 3′-end of the iRNA. In another embodiment, the nucleotide mismatch is, for example, in the 3′-terminal nucleotide of the iRNA agent. In some embodiments, the mismatch(s) is not in the seed region.

[0128] Thus, an RNAi agent as described herein can contain one or more mismatches to the target sequence. In one embodiment, a RNAi agent as described herein contains no more than 3 mismatches (i.e., 3, 2, 1, or 0 mismatches). In one embodiment, an RNAi agent as described herein contains no more than 2 mismatches. In one embodiment, an RNAi agent as described herein contains no more than 1 mismatch. In one embodiment, an RNAi agent as described herein contains 0 mismatches. In certain embodiments, if the antisense strand of the RNAi agent contains mismatches to the target sequence, the mismatch can optionally be restricted to be within the last 5 nucleotides from either the 5′- or 3′-end of the region of complementarity. For example, in such embodiments, for a 23 nucleotide RNAi agent, the strand which is complementary to a region of a KHK gene, generally does not contain any mismatch within the central 13 nucleotides. The methods described herein or methods known in the art can be used to determine whether an RNAi agent containing a mismatch to a target sequence is effective in inhibiting the expression of a KHK gene. Consideration of the efficacy of RNAi agents with mismatches in inhibiting expression of a KHK gene is important, especially if the particular region of complementarity in a KHK gene is known to have polymorphic sequence variation within the population.

[0129] The term “sense strand” or “passenger strand” as used herein, refers to the strand of an iRNA that includes a region that is substantially complementary to a region of the antisense strand as that term is defined herein.

[0130] As used herein, “substantially all of the nucleotides are modified” are largely but not wholly modified and can include not more than 5, 4, 3, 2, or 1 unmodified nucleotides.

[0131] As used herein, the term “cleavage region” refers to a region that is located immediately adjacent to the cleavage site. The cleavage site is the site on the target at which cleavage occurs. In some embodiments, the cleavage region comprises three bases on either end of, and immediately adjacent to, the cleavage site. In some embodiments, the cleavage region comprises two bases on either end of, and immediately adjacent to, the cleavage site. In some embodiments, the cleavage site specifically occurs at the site bound by nucleotides 10 and 11 of the antisense strand, and the cleavage region comprises nucleotides 11, 12 and 13.

[0132] As used herein, and unless otherwise indicated, the term “complementary,” when used to describe a first nucleotide sequence in relation to a second nucleotide sequence, refers to the ability of an oligonucleotide or polynucleotide comprising the first nucleotide sequence to hybridize and form a duplex structure under certain conditions with an oligonucleotide or polynucleotide comprising the second nucleotide sequence, as will be understood by the skilled person. Such conditions can, for example, be stringent conditions, where stringent conditions can include: 400 mM NaCl, 40 mM PIPES pH 6.4, 1 mM EDTA, 50° C. or 70° C. for 12-16 hours followed by washing (see, e.g., “Molecular Cloning: A Laboratory Manual, Sambrook, et al. (1989) Cold Spring Harbor Laboratory Press). Other conditions, such as physiologically relevant conditions as can be encountered inside an organism, can apply. The skilled person will be able to determine the set of conditions most appropriate for a test of complementarity of two sequences in accordance with the ultimate application of the hybridized nucleotides.

[0133] Complementary sequences within an iRNA, e.g., within a dsRNA as described herein, include base-pairing of the oligonucleotide or polynucleotide comprising a first nucleotide sequence to an oligonucleotide or polynucleotide comprising a second nucleotide sequence over the entire length of one or both nucleotide sequences. Such sequences can be referred to as “fully complementary” with respect to each other herein. However, where a first sequence is referred to as “substantially complementary” with respect to a second sequence herein, the two sequences can be fully complementary, or they can form one or more, but generally not more than 5, 4, 3, or 2 mismatched base pairs upon hybridization for a duplex up to 30 base pairs, while retaining the ability to hybridize under the conditions most relevant to their ultimate application, e.g., inhibition of gene expression, in vitro or in vivo. However, where two oligonucleotides are designed to form, upon hybridization, one or more single stranded overhangs, such overhangs shall not be regarded as mismatches with regard to the determination of complementarity. For example, a dsRNA comprising one oligonucleotide 21 nucleotides in length and another oligonucleotide 23 nucleotides in length, wherein the longer oligonucleotide comprises a sequence of 21 nucleotides that is fully complementary to the shorter oligonucleotide, can yet be referred to as “fully complementary” for the purposes described herein.

[0134] “Complementary” sequences, as used herein, can also include, or be formed entirely from, non-Watson-Crick base pairs or base pairs formed from non-natural and modified nucleotides, in so far as the above requirements with respect to their ability to hybridize are fulfilled. Such non-Watson-Crick base pairs include, but are not limited to, G:U Wobble or Hoogsteen base pairing.

[0135] The terms “complementary,” “fully complementary” and “substantially complementary” herein can be used with respect to the base matching between the sense strand and the antisense strand of a dsRNA, or between two oligonucleotides or polynucleotides, such as the antisense strand of a double stranded RNA agent and a target sequence, as will be understood from the context of their use.

[0136] As used herein, a polynucleotide that is “substantially complementary to at least part of” a messenger RNA (mRNA) refers to a polynucleotide that is substantially complementary to a contiguous portion of the mRNA of interest (e.g., an mRNA encoding a ketohexokinase gene). For example, a polynucleotide is complementary to at least a part of a ketohexokinase mRNA if the sequence is substantially complementary to a non-interrupted portion of an mRNA encoding a ketohexokinase gene.

[0137] Accordingly, in some embodiments, the antisense polynucleotides disclosed herein are fully complementary to the target KHK sequence.

[0138] In other embodiments, the antisense polynucleotides disclosed herein are substantially complementary to the target KHK sequence and comprise a contiguous nucleotide sequence which is at least 80% complementary over its entire length to the equivalent region of the nucleotide sequence of any one of SEQ ID NOs:1, 3, 5, 7, 9, 11, 13, 15, 17, 19, 21, 23, 25, 27, 29, 31, 33 or 35, or a fragment of any one of SEQ ID NOs:1, 3, 5, 7, 9, 11, 13, 15, 17, 19, 21, 23, 25, 27, 29, 31, 33 or 35, such as about 85%, about 90%, about 91%, about 92%, about 93%, about 94%, about 95%, about 96%, about 97%, about 98%, or about 99% complementary.

[0139] In some embodiments, the antisense polynucleotides disclosed herein are substantially complementary to a fragment of a target KHK sequence and comprise a contiguous nucleotide sequence which is at least 80% complementary over its entire length to a fragment of SEQ ID NO: 1 selected from the group of nucleotides 943-965; 788-810; 734-756; 1016-1038; 1013-1035; 1207-1229; 1149-1171; 574-596; 1207-1229 or 828-850 of SEQ ID NO: 1, such as about 85%, about 90%, about 91%, about 92%, about 93%, about 94%, about 95%, about 96%, about 97%, about 98%, or about 99% complementary.

[0140] In other embodiments, the antisense polynucleotides disclosed herein are substantially complementary to the target KHK sequence and comprise a contiguous nucleotide sequence which is at least about 80% complementary over its entire length to any one of the sense strand nucleotide sequences in any one of any one of Tables 2-5, or a fragment of any one of the sense strand nucleotide sequences in any one of Tables 2-5, such as about 85%, about 90%, about 91%, about 92%, about 93%, about 94%, about 95%, about 96%, about 97%, about 98%, about 99%, or 100% complementary.

[0141] In one embodiment, an RNAi agent of the disclosure includes a sense strand that is substantially complementary to an antisense polynucleotide which, in turn, is the same as a target KHK sequence, and wherein the sense strand polynucleotide comprises a contiguous nucleotide sequence which is at least about 80% complementary over its entire length to the equivalent region of the nucleotide sequence of SEQ ID NOs: 2, 4, 6, 8, 10, 12, 14, 16, 18, 20, 22, 24, 26, 28, 30, 32, 34 or 36, or a fragment of any one of SEQ ID NOs:2, 4, 6, 8, 10, 12, 14, 16, 18, 20, 22, 24, 26, 28, 30, 32, 34 or 36, such as about 85%, about 90%, about 91%, about 92%, about 93%, about 94%, about 95%, about 96%, about 97%, about 98%, about 99%, or 100% complementary.

[0142] In some embodiments, an iRNA of the invention includes a sense strand that is substantially complementary to an antisense polynucleotide which, in turn, is complementary to a target ketohexokinase sequence, and wherein the sense strand polynucleotide comprises a contiguous nucleotide sequence which is at least about 80% complementary over its entire length to any one of the antisense strand nucleotide sequences in any one of any one of Tables 2-5, or a fragment of any one of the antisense strand nucleotide sequences in any one of Tables 2-5, such as about 85%, about 90%, about 91%, about 92%, about 93%, about 94%, about 95%, about 96%, about 97%, about 98%, about 99%, or 100% complementary

[0143] In certain embodiments, the sense and antisense strands are selected from any one of duplexes AD-252498.1, AD-252339.1, AD-252285.1, AD-252531.1, AD-254265.1, AD-254403.1, AD-252627.1, AD-252146.1, AD-252666.1 and AD-252379.1.

[0144] In some embodiments, the double-stranded region of a double-stranded iRNA agent is equal to or at least, 10, 11, 12, 13, 14, 15, 16, 17, 18, 19, 20, 21, 22, 23, 23, 24, 25, 26, 27, 28, 29, 30 or more nucleotide pairs in length.

[0145] In some embodiments, the antisense strand of a double-stranded iRNA agent is equal to or at least 14, 15, 16, 17, 18, 19, 20, 21, 22, 23, 23, 24, 25, 26, 27, 28, 29, or 30 nucleotides in length.

[0146] In some embodiments, the sense strand of a double-stranded iRNA agent is equal to or at least 10, 11, 12, 13, 14, 15, 16, 17, 18, 19, 20, 21, 22, 23, 23, 24, 25, 26, 27, 28, 29, or 30 nucleotides in length.

[0147] In one embodiment, the sense and antisense strands of the double-stranded iRNA agent are each 15 to 30 nucleotides in length.

[0148] In one embodiment, the sense and antisense strands of the double-stranded iRNA agent are each 19 to 25 nucleotides in length.

[0149] In one embodiment, the sense and antisense strands of the double-stranded iRNA agent are each 21 to 23 nucleotides in length.

[0150] In one embodiment, the sense strand of the iRNA agent is 21-nucleotides in length, and the antisense strand is 23-nucleotides in length, wherein the strands form a double-stranded region of 21 consecutive base pairs having a 2-nucleotide long single stranded overhangs at the 3-end.

[0151] In some embodiments, the majority of nucleotides of each strand are ribonucleotides, but as described in detail herein, each or both strands can also include one or more non-ribonucleotides, e.g., a deoxyribonucleotide and/or a modified nucleotide. In addition, an “iRNA” may include ribonucleotides with chemical modifications. Such modifications may include all types of modifications disclosed herein or known in the art. Any such modifications, as used in an iRNA molecule, are encompassed by “iRNA” for the purposes of this specification and claims.

[0152] In certain embodiments of the instant disclosure, inclusion of a deoxy-nucleotide if present within an RNAi agent can be considered to constitute a modified nucleotide.

[0153] In an aspect of the invention, an agent for use in the methods and compositions of the invention is a single-stranded antisense oligonucleotide molecule that inhibits a target mRNA via an antisense inhibition mechanism. The single-stranded antisense oligonucleotide molecule is complementary to a sequence within the target mRNA. The single-stranded antisense oligonucleotides can inhibit translation in a stoichiometric manner by base pairing to the mRNA and physically obstructing the translation machinery, see Dias, N. et al., (2002) Mol Cancer Ther 1:347-355. The single-stranded antisense oligonucleotide molecule may be about 14 to about 30 nucleotides in length and have a sequence that is complementary to a target sequence. For example, the single-stranded antisense oligonucleotide molecule may comprise a sequence that is at least about 14, 15, 16, 17, 18, 19, 20, or more contiguous nucleotides from any one of the antisense sequences described herein.

[0154] In one embodiment, at least partial suppression of the expression of a KHK gene, is assessed by a reduction of the amount of KHK mRNA which can be isolated from or detected in a first cell or group of cells in which a KHK gene is transcribed and which has or have been treated such that the expression of a KHK gene is inhibited, as compared to a second cell or group of cells substantially identical to the first cell or group of cells but which has or have not been so treated (control cells). The degree of inhibition may be expressed in terms of:

$$\frac{( mRNA in control cells ) - ( mRNA in treated cells )}{( mRNA in control cells )} 100 \%$$

[0155] The phrase “contacting a cell with an iRNA,” such as a dsRNA, as used herein, includes contacting a cell by any possible means. Contacting a cell with an iRNA includes contacting a cell in vitro with the iRNA or contacting a cell in vivo with the iRNA. The contacting may be done directly or indirectly. Thus, for example, the iRNA may be put into physical contact with the cell by the individual performing the method, or alternatively, the iRNA may be put into a situation that will permit or cause it to subsequently come into contact with the cell.

[0156] Contacting a cell in vitro may be done, for example, by incubating the cell with the iRNA. Contacting a cell in vivo may be done, for example, by injecting the iRNA into or near the tissue where the cell is located, or by injecting the iRNA into another area, e.g., the bloodstream or the subcutaneous space, such that the agent will subsequently reach the tissue where the cell to be contacted is located. For example, the iRNA may contain or be coupled to a ligand, e.g., GalNAc, that directs the iRNA to a site of interest, e.g., the liver. Combinations of in vitro and in vivo methods of contacting are also possible. For example, a cell may also be contacted in vitro with an iRNA and subsequently transplanted into a subject.

[0157] In certain embodiments, contacting a cell with an iRNA includes “introducing” or “delivering the iRNA into the cell” by facilitating or effecting uptake or absorption into the cell. Absorption or uptake of an iRNA can occur through unaided diffusion or active cellular processes, or by auxiliary agents or devices. Introducing an iRNA into a cell may be in vitro or in vivo. For example, for in vivo introduction, iRNA can be injected into a tissue site or administered systemically. In vitro introduction into a cell includes methods known in the art such as electroporation and lipofection. Further approaches are described herein below or are known in the art.

[0158] The term “lipid nanoparticle” or “LNP” is a vesicle comprising a lipid layer encapsulating a pharmaceutically active molecule, such as a nucleic acid molecule, e.g., an iRNA or a plasmid from which an iRNA is transcribed. LNPs are described in, for example, U.S. Pat. Nos. 6,858,225, 6,815,432, 8,158,601, and 8,058,069, the entire contents of which are hereby incorporated herein by reference.

[0159] As used herein, a “subject” is an animal, such as a mammal, including a primate (such as a human, a non-human primate, e.g., a monkey, and a chimpanzee), a non-primate (such as a cow, a pig, a horse, a goat, a rabbit, a sheep, a hamster, a guinea pig, a cat, a dog, a rat, or a mouse), or a bird that expresses the target gene, either endogenously or heterologously. In an embodiment, the subject is a human, such as a human being treated or assessed for a disease or disorder that would benefit from reduction in KHK expression; a human at risk for a disease or disorder that would benefit from reduction in KHK expression; a human having a disease or disorder that would benefit from reduction in KHK expression; or human being treated for a disease or disorder that would benefit from reduction in KHK expression as described herein. In some embodiments, the subject is a female human. In other embodiments, the subject is a male human. In one embodiment, the subject is an adult subject. In another embodiment, the subject is a pediatric subject.

[0160] As used herein, the terms “treating” or “treatment” refer to a beneficial or desired result, such as reducing at least one sign or symptom of a KHK-associated disorder in a subject. Treatment also includes a reduction of one or more sign or symptoms associated with unwanted KHK expression; diminishing the extent of unwanted KHK activation or stabilization; amelioration or palliation of unwanted KHK activation or stabilization. “Treatment” can also mean prolonging survival as compared to expected survival in the absence of treatment.

[0161] The term “lower” in the context of the level of KHK in a subject or a disease marker or symptom refers to a statistically significant decrease in such level. The decrease can be, for example, at least 10%, 15%, 20%, 25%, 30%, %, 40%, 45%, 50%, 55%, 60%, 65%, 70%, 75%, 80%, 85%, 90%, 95%, or more. In certain embodiments, a decrease is at least 20%. In certain embodiments, the decrease is at least 50% in a disease marker, e.g., protein or gene expression level. “Lower” in the context of the level of KHK in a subject is decreased to a level accepted as within the range of normal for an individual without such disorder. In certain embodiments, the expression of the target is normalized, i.e., decreased towards or to a level accepted as within the range of normal for an individual without such disorder, e.g., normalization of body weight, blood pressure, or a serum lipid level. As used here, “lower” in a subject can refer to lowering of gene expression or protein production in a cell in a subject does not require lowering of expression in all cells or tissues of a subject. For example, as used herein, lowering in a subject can include lowering of gene expression or protein production in the liver of a subject.

[0162] The term “lower” can also be used in association with normalizing a symptom of a disease or condition, i.e. decreasing the difference between a level in a subject suffering from a KHK-associated disease towards or to a level in a normal subject not suffering from a KHK-associated disease. For example, if a subject with a normal weight of 70 kg weighs 90 kg prior to treatment (20 kg overweight) and 80 kg after treatment (10 kg overweight), the subject's weight is lowered towards a normal weight by 50% (10/20×100%). Similarly, if the HDL level of a woman is increased from 50 mg/dL (poor) to 57 mg/dL, with a normal level being 60 mg/dL, the difference between the prior level of the subject and the normal level is decreased by 70% (difference of 10 mg/dL between subject level and normal is decreased by 7 mg/dL, 7/10×100%). As used herein, if a disease is associated with an elevated value for a symptom, “normal” is considered to be the upper limit of normal. If a disease is associated with a decreased value for a symptom, “normal” is considered to be the lower limit of normal.

[0163] As used herein, “prevention” or “preventing,” when used in reference to a disease, disorder or condition thereof, that would benefit from a reduction in expression of a KHK gene or production of KHK protein, refers to a reduction in the likelihood that a subject will develop a symptom associated with such a disease, disorder, or condition, e.g., a sign or symptom of KHK gene expression or KHK activity and increased fructose metabolism. Without being bound by mechanism, it is known that fructose phosphorylation catalyzed by KHK to form fructose-1-phosphate is not regulated by feedback inhibition which can result in depletion of ATP and intracellular phosphate, an increase AMP levels, which results in the production of uric acid. Further, the fructose-1-phosphate is metabolized to glyceraldehyde which feeds into the citric acid cycle increasing the production of acetyl Co-A stimulating fatty acid synthesis. Diseases and conditions associated with elevated uric acid and fatty acid synthesis include, e.g., liver disease (e.g., fatty liver, steatohepatitis including non-alcoholic steatohepatitis (NASH)), dyslipidemia (e.g., hyperlipidemia, high LDL cholesterol, low HDL cholesterol, hypertriglyceridemia, postprandial hypertriglyceridemia), disorders of glycemic control (e.g., insulin resistance not related to immune response to insulin, type 2 diabetes), cardiovascular disease (e.g., hypertension, endothelial cell dysfunction), kidney disease (e.g., acute kidney disorder, tubular dysfunction, proinflammatory changes to the proximal tubules, chronic kidney disease), metabolic syndrome, disease of lipid deposition or dysfunction (e.g., adipocyte dysfunction, visceral adipose deposition, obesity), disease of elevated uric acid (e.g., hyperuricemia, gout), and eating disorders such as excessive sugar craving. The failure to develop a disease, disorder or condition, or the reduction in the development of a symptom or comorbidity associated with such a disease, disorder or condition (e.g., by at least about 10% on a clinically accepted scale for that disease or disorder), or the exhibition of delayed signs or symptoms or disease progression by days, weeks, months or years is considered effective prevention.

[0164] As used herein, the term “ketohexokinase disease” or “KHK-associated disease,” is a disease or disorder that is caused by, or associated with, KHK gene expression or KHK protein production. The term “KHK-associated disease” includes a disease, disorder or condition that would benefit from a decrease in KHK gene expression, replication, or protein activity. Non-limiting examples of KHK-associated diseases include, for example, liver disease (e.g., fatty liver, steatohepatitis including non-alcoholic steatohepatitis (NASH)), dyslipidemia (e.g., hyperlipidemia, high LDL cholesterol, low HDL cholesterol, hypertriglyceridemia, postprandial hypertriglyceridemia), disorders of glycemic control (e.g., insulin resistance not related to immune response to insulin, type 2 diabetes), cardiovascular disease (e.g., hypertension, endothelial cell dysfunction), kidney disease (e.g., acute kidney disorder, tubular dysfunction, proinflammatory changes to the proximal tubules, chronic kidney disease), metabolic syndrome, disease of lipid deposition or dysfunction (e.g., adipocyte dysfunction, visceral adipose deposition, obesity), disease of elevated uric acid (e.g., hyperuricemia, gout), and eating disorders such as excessive sugar craving. Further details regarding signs and symptoms of the various diseases or conditions are provided herein and are well known in the art.

[0165] In certain embodiments, a KHK-associated disease is associated with elevated uric acid (e.g. hyperuricemia, gout).

[0166] In certain embodiments, a KHK-associated disease is associated with elevated lipid levels (e.g., fatty liver, steatohepatitis including non-alcoholic steatohepatitis (NASH), dyslipidemia).

[0167] “Therapeutically effective amount,” as used herein, is intended to include the amount of an RNAi agent that, when administered to a subject having a KHK-associated disease, is sufficient to effect treatment of the disease (e.g., by diminishing, ameliorating, or maintaining the existing disease or one or more symptoms of disease). The “therapeutically effective amount” may vary depending on the RNAi agent, how the agent is administered, the disease and its severity and the history, age, weight, family history, genetic makeup, the types of preceding or concomitant treatments, if any, and other individual characteristics of the subject to be treated.

[0168] “Prophylactically effective amount,” as used herein, is intended to include the amount of an RNAi agent that, when administered to a subject having a KHK-associated disorder, is sufficient to prevent or ameliorate the disease or one or more symptoms of the disease. Ameliorating the disease includes slowing the course of the disease or reducing the severity of later-developing disease. The “prophylactically effective amount” may vary depending on the RNAi agent, how the agent is administered, the degree of risk of disease, and the history, age, weight, family history, genetic makeup, the types of preceding or concomitant treatments, if any, and other individual characteristics of the patient to be treated.

[0169] A “therapeutically-effective amount” or “prophylactically effective amount” also includes an amount of an RNAi agent that produces some desired effect at a reasonable benefit/risk ratio applicable to any treatment. The iRNA employed in the methods of the present invention may be administered in a sufficient amount to produce a reasonable benefit/risk ratio applicable to such treatment.

[0170] The phrase “pharmaceutically acceptable” is employed herein to refer to those compounds, materials, compositions, or dosage forms which are, within the scope of sound medical judgment, suitable for use in contact with the tissues of human subjects and animal subjects without excessive toxicity, irritation, allergic response, or other problem or complication, commensurate with a reasonable benefit/risk ratio.

[0171] The phrase “pharmaceutically-acceptable carrier” as used herein means a pharmaceutically-acceptable material, composition, or vehicle, such as a liquid or solid filler, diluent, excipient, manufacturing aid (e.g., lubricant, talc magnesium, calcium or zinc stearate, or steric acid), or solvent encapsulating material, involved in carrying or transporting the subject compound from one organ, or portion of the body, to another organ, or portion of the body. Each carrier must be “acceptable” in the sense of being compatible with the other ingredients of the formulation and not injurious to the subject being treated. Such carriers are known in the art. Pharmaceutically acceptable carriers include carriers for administration by injection.

[0172] The term “sample,” as used herein, includes a collection of similar fluids, cells, or tissues isolated from a subject, as well as fluids, cells, or tissues present within a subject. Examples of biological fluids include blood, serum and serosal fluids, plasma, cerebrospinal fluid, ocular fluids, lymph, urine, saliva, and the like. Tissue samples may include samples from tissues, organs, or localized regions. For example, samples may be derived from particular organs, parts of organs, or fluids or cells within those organs. In certain embodiments, samples may be derived from the liver (e.g., whole liver or certain segments of liver or certain types of cells in the liver, such as, e.g., hepatocytes). In some embodiments, a “sample derived from a subject” refers to urine obtained from the subject. A “sample derived from a subject” can refer to blood or blood derived serum or plasma from the subject.

### II. iRNAs of the Invention

[0173] The present invention provides iRNAs which inhibit the expression of a ketohexokinase gene. In some embodiments, the iRNA includes double stranded ribonucleic acid (dsRNA) molecules for inhibiting the expression of a KHK gene in a cell, such as a cell within a subject, e.g., a mammal, such as a human susceptible to developing a ketohexokinase-associated disorder. The dsRNAi agent includes an antisense strand having a region of complementarity which is complementary to at least a part of an mRNA formed in the expression of a KHK gene. The region of complementarity is about 19-30 nucleotides in length (e.g., about 30, 29, 28, 27, 26, 25, 24, 23, 22, 21, 20, or 19 nucleotides in length). Upon contact with a cell expressing the KHK gene, the iRNA inhibits the expression of the KHK gene (e.g., a human, a primate, a non-primate, or a rat KHK gene) by at least about 50% as assayed by, for example, a PCR or branched DNA (bDNA)-based method, or by a protein-based method, such as by immunofluorescence analysis, using, for example, western blotting or flow cytometric techniques. In some embodiments, inhibition of expression is determined by the qPCR method provided in the examples herein with the siRNA at, e.g., a 10 nM concentration, in an appropriate organism cell line provided therein. In some embodiments, inhibition of expression in vivo is determined by knockdown of the human gene in a rodent expressing the human gene, e.g., a mouse or an AAV-infected mouse expressing the human target gene, e.g., when administered as single dose, e.g., at 3 mg/kg at the nadir of RNA expression.

[0174] A dsRNA includes two RNA strands that are complementary and hybridize to form a duplex structure under conditions in which the dsRNA will be used. One strand of a dsRNA (the antisense strand) includes a region of complementarity that is substantially complementary, and generally fully complementary, to a target sequence. The target sequence can be derived from the sequence of an mRNA formed during the expression of a KHK gene. The other strand (the sense strand) includes a region that is complementary to the antisense strand, such that the two strands hybridize and form a duplex structure when combined under suitable conditions. As described elsewhere herein and as known in the art, the complementary sequences of a dsRNA can also be contained as self-complementary regions of a single nucleic acid molecule, as opposed to being on separate oligonucleotides.

[0175] Generally, the duplex structure is 15 to 30 base pairs in length, e.g., 15-29, 15-28, 15-27, 15-26, 15-25, 15-24, 15-23, 15-22, 15-21, 15-20, 15-19, 15-18, 15-17, 18-30, 18-29, 18-28, 18-27, 18-26, 18-25, 18-24, 18-23, 18-22, 18-21, 18-20, 19-30, 19-29, 19-28, 19-27, 19-26, 19-25, 19-24, 19-23, 19-22, 19-21, 19-20, 20-30, 20-29, 20-28, 20-27, 20-26, 20-25, 20-24,20-23, 20-22, 20-21, 21-30, 21-29, 21-28, 21-27, 21-26, 21-25, 21-24, 21-23, or 21-22 base pairs in length. In certain embodiments, the duplex structure is 18 to 25 base pairs in length, e.g., 18-25, 18-24, 18-23, 18-22, 18-21, 18-20, 19-25, 19-24, 19-23, 19-22, 19-21, 19-20, 20-25, 20-24,20-23, 20-22, 20-21, 21-25, 21-24, 21-23, 21-22, 22-25, 22-24, 22-23, 23-25, 23-24 or 24-25 base pairs in length, for example, 19-21 basepairs in length. Ranges and lengths intermediate to the above recited ranges and lengths are also contemplated to be part of the disclosure.

[0176] Similarly, the region of complementarity to the target sequence is 15 to 30 nucleotides in length, e.g., 15-29, 15-28, 15-27, 15-26, 15-25, 15-24, 15-23, 15-22, 15-21, 15-20, 15-19, 15-18, 15-17, 18-30, 18-29, 18-28, 18-27, 18-26, 18-25, 18-24, 18-23, 18-22, 18-21, 18-20, 19-30, 19-29, 19-28, 19-27, 19-26, 19-25, 19-24, 19-23, 19-22, 19-21, 19-20, 20-30, 20-29, 20-28, 20-27, 20-26, 20-25, 20-24,20-23, 20-22, 20-21, 21-30, 21-29, 21-28, 21-27, 21-26, 21-25, 21-24, 21-23, or 21-22 nucleotides in length, for example 19-23 nucleotides in length or 21-23 nucleotides in length. Ranges and lengths intermediate to the above recited ranges and lengths are also contemplated to be part of the disclosure.

[0177] In some embodiments, the duplex structure is 19 to 30 base pairs in length. Similarly, the region of complementarity to the target sequence is 19 to 30 nucleotides in length.

[0178] In some embodiments, the dsRNA is about 19 to about 23 nucleotides in length, or about 25 to about 30 nucleotides in length. In general, the dsRNA is long enough to serve as a substrate for the Dicer enzyme. For example, it is well-known in the art that dsRNAs longer than about 21-23 nucleotides in length may serve as substrates for Dicer. As the ordinarily skilled person will also recognize, the region of an RNA targeted for cleavage will most often be part of a larger RNA molecule, often an mRNA molecule. Where relevant, a “part” of an mRNA target is a contiguous sequence of an mRNA target of sufficient length to allow it to be a substrate for RNAi-directed cleavage (i.e., cleavage through a RISC pathway).

[0179] One of skill in the art will also recognize that the duplex region is a primary functional portion of a dsRNA, e.g., a duplex region of about 19 to about 30 base pairs, e.g., about 19-30, 19-29, 19-28, 19-27, 19-26, 19-25, 19-24, 19-23, 19-22, 19-21, 19-20, 20-30, 20-29, 20-28, 20-27, 20-26, 20-25, 20-24,20-23, 20-22, 20-21, 21-30, 21-29, 21-28, 21-27, 21-26, 21-25, 21-24, 21-23, or 21-22 base pairs. Thus, in one embodiment, to the extent that it becomes processed to a functional duplex, of e.g., 15-30 base pairs, that targets a desired RNA for cleavage, an RNA molecule or complex of RNA molecules having a duplex region greater than 30 base pairs is a dsRNA. Thus, an ordinarily skilled artisan will recognize that in one embodiment, a miRNA is a dsRNA. In another embodiment, a dsRNA is not a naturally occurring miRNA. In another embodiment, an iRNA agent useful to target ketohexokinase gene expression is not generated in the target cell by cleavage of a larger dsRNA.

[0180] A dsRNA as described herein can further include one or more single-stranded nucleotide overhangs e.g., 1-4, 2-4, 1-3, 2-3, 1, 2, 3, or 4 nucleotides. dsRNAs having at least one nucleotide overhang can have superior inhibitory properties relative to their blunt-ended counterparts. A nucleotide overhang can comprise or consist of a nucleotide/nucleoside analog, including a deoxynucleotide/nucleoside. The overhang(s) can be on the sense strand, the antisense strand, or any combination thereof. Furthermore, the nucleotide(s) of an overhang can be present on the 5′-end, 3′-end, or both ends of an antisense or sense strand of a dsRNA.

[0181] A dsRNA can be synthesized by standard methods known in the art. Double stranded RNAi compounds of the invention may be prepared using a two-step procedure. First, the individual strands of the double stranded RNA molecule are prepared separately. Then, the component strands are annealed. The individual strands of the siRNA compound can be prepared using solution-phase or solid-phase organic synthesis or both. Organic synthesis offers the advantage that the oligonucleotide strands comprising unnatural or modified nucleotides can be easily prepared. Similarly, single-stranded oligonucleotides of the invention can be prepared using solution-phase or solid-phase organic synthesis or both.

[0182] iRNA compounds of the invention may be prepared using a two-step procedure. First, the individual strands of the double stranded RNA molecule are prepared separately. Then, the component strands are annealed. The individual strands of the siRNA compound can be prepared using solution-phase or solid-phase organic synthesis or both. Organic synthesis offers the advantage that the oligonucleotide strands comprising unnatural or modified nucleotides can be easily prepared. Single-stranded oligonucleotides of the invention can be prepared using solution-phase or solid-phase organic synthesis or both.

[0183] An siRNA can be produced, e.g., in bulk, by a variety of methods. Exemplary methods include: organic synthesis and RNA cleavage, e.g., in vitro cleavage.

[0184] An siRNA can be made by separately synthesizing a single stranded RNA molecule, or each respective strand of a double-stranded RNA molecule, after which the component strands can then be annealed.

[0185] A large bioreactor, e.g., the OligoPilot II from Pharmacia Biotec AB (Uppsala Sweden), can be used to produce a large amount of a particular RNA strand for a given siRNA. The OligoPilotII reactor can efficiently couple a nucleotide using only a 1.5 molar excess of a phosphoramidite nucleotide. To make an RNA strand, ribonucleotides amidites are used. Standard cycles of monomer addition can be used to synthesize the 21 to 23 nucleotide strand for the siRNA. Typically, the two complementary strands are produced separately and then annealed, e.g., after release from the solid support and deprotection.

[0186] Organic synthesis can be used to produce a discrete siRNA species. The complementary of the species to a KHK gene can be precisely specified. For example, the species may be complementary to a region that includes a polymorphism, e.g., a single nucleotide polymorphism. Further the location of the polymorphism can be precisely defined. In some embodiments, the polymorphism is located in an internal region, e.g., at least 4, 5, 7, or 9 nucleotides from one or both of the termini.

[0187] In one embodiment, RNA generated is carefully purified to remove endsiRNA is cleaved in vitro into siRNAs, for example, using a Dicer or comparable RNAse III-based activity. For example, the dsiRNA can be incubated in an in vitro extract from Drosophila or using purified components, e.g., a purified RNAse or RISC complex (RNA-induced silencing complex). See, e.g., Ketting et al. Genes Dev 2001 Oct. 15; 15(20):2654-9 and Hammond Science 2001 Aug. 10; 293(5532):1146-50.

[0188] dsiRNA cleavage generally produces a plurality of siRNA species, each being a particular 21 to 23 nt fragment of a source dsiRNA molecule. For example, siRNAs that include sequences complementary to overlapping regions and adjacent regions of a source dsiRNA molecule may be present.

[0189] Regardless of the method of synthesis, the siRNA preparation can be prepared in a solution (e.g., an aqueous and/or organic solution) that is appropriate for formulation. For example, the siRNA preparation can be precipitated and redissolved in pure double-distilled water, and lyophilized. The dried siRNA can then be resuspended in a solution appropriate for the intended formulation process.

[0190] In an aspect, a dsRNA of the invention includes at least two nucleotide sequences, a sense sequence and an anti-sense sequence. The sense strand is selected from the group of sequences provided in any one of Tables 2-5, and the corresponding antisense strand of the sense strand is selected from the group of sequences of any one of Tables 2-5. In this aspect, one of the two sequences is complementary to the other of the two sequences, with one of the sequences being substantially complementary to a sequence of an mRNA generated in the expression of a ketohexokinase gene. As such, in this aspect, a dsRNA will include two oligonucleotides, where one oligonucleotide is described as the sense strand in any one of Tables 2-5, and the second oligonucleotide is described as the corresponding antisense strand of the sense strand in any one of Tables 2-5.

[0191] In certain embodiments, the substantially complementary sequences of the dsRNA are contained on separate oligonucleotides. In other embodiments, the substantially complementary sequences of the dsRNA are contained on a single oligonucleotide.

[0192] In certain embodiments, the sense or antisense strand is selected from the sense or antisense strand of any one of duplexes AD-252498.1, AD-252339.1, AD-252285.1, AD-252531.1, AD-254265.1, AD-254403.1, AD-252627.1, AD-252146.1, AD-252666.1 and AD-252379.1.

[0193] It will be understood that, although the sequences in Tables 2 and 4 are not described as modified or conjugated sequences, the RNA of the iRNA of the invention e.g., a dsRNA of the invention, may comprise any one of the sequences set forth in any one of Tables 2-5 that is un-modified, un-conjugated, or modified or conjugated differently than described therein. In other words, the invention encompasses dsRNA of Tables 2-5 which are un-modified, un-conjugated, modified, or conjugated, as described herein.

[0194] The skilled person is well aware that dsRNAs having a duplex structure of about 20 to 23 base pairs, e.g., 21, base pairs have been hailed as particularly effective in inducing RNA interference (Elbashir et al., EMBO 2001, 20:6877-6888). However, others have found that shorter or longer RNA duplex structures can also be effective (Chu and Rana (2007) RNA 14:1714-1719; Kim et al. (2005) Nat Biotech 23:222-226). In the embodiments described above, by virtue of the nature of the oligonucleotide sequences provided in any one of Tables 2-5, dsRNAs described herein can include at least one strand of a length of minimally 21 nucleotides. It can be reasonably expected that shorter duplexes having any one of the sequences in any one of Tables 2-5 minus only a few nucleotides on one or both ends can be similarly effective as compared to the dsRNAs described above. Hence, dsRNAs having a sequence of at least 19, 20, or more contiguous nucleotides derived from any one of the sequences of any one of Tables 2-5, and differing in their ability to inhibit the expression of a ketohexokinase gene by not more than about 5, 10, 15, 20, 25, or 30% inhibition from a dsRNA comprising the full sequence, are contemplated to be within the scope of the present invention.

[0195] In addition, the RNAs provided in Tables 2-5 identify a site(s) in a ketohexokinase transcript that is susceptible to RISC-mediated cleavage. As such, the present invention further features iRNAs that target within one of these sites. As used herein, an iRNA is said to target within a particular site of an RNA transcript if the iRNA promotes cleavage of the transcript anywhere within that particular site. Such an iRNA will generally include at least about 19 contiguous nucleotides from any one of the sequences provided in any one of Tables 2-5 coupled to additional nucleotide sequences taken from the region contiguous to the selected sequence in a ketohexokinase gene.

[0196] An RNAi agent as described herein can contain one or more mismatches to the target sequence. In one embodiment, an RNAi agent as described herein contains no more than 3 mismatches (i.e., 3, 2, 1, or 0 mismatches). In one embodiment, an RNAi agent as described herein contains no more than 2 mismatches. In one embodiment, an RNAi agent as described herein contains no more than 1 mismatch. In one embodiment, an RNAi agent as described herein contains 0 mismatches. In certain embodiments, if the antisense strand of the RNAi agent contains mismatches to the target sequence, the mismatch can optionally be restricted to be within the last 5 nucleotides from either the 5′- or 3′-end of the region of complementarity. For example, in such embodiments, for a 23 nucleotide RNAi agent, the strand which is complementary to a region of a KHK gene generally does not contain any mismatch within the central 13 nucleotides. The methods described herein or methods known in the art can be used to determine whether an RNAi agent containing a mismatch to a target sequence is effective in inhibiting the expression of a KHK gene. Consideration of the efficacy of RNAi agents with mismatches in inhibiting expression of a KHK gene is important, especially if the particular region of complementarity in a KHK gene is known to have polymorphic sequence variation within the population.

### III. Modified iRNAs of the Invention

[0197] In certain embodiments, the RNA of the iRNA of the invention e.g., a dsRNA, is un-modified, and does not comprise, e.g., chemical modifications or conjugations known in the art and described herein. In other embodiments, the RNA of an iRNA of the invention, e.g., a dsRNA, is chemically modified to enhance stability or other beneficial characteristics. In certain embodiments of the invention, substantially all of the nucleotides of an iRNA of the invention are modified. In other embodiments of the invention, all of the nucleotides of an iRNA or substantially all of the nucleotides of an iRNA are modified, i.e., not more than 5, 4, 3, 2, or 1 unmodified nucleotides are present in a strand of the iRNA.

[0198] The nucleic acids featured in the invention can be synthesized or modified by methods well established in the art, such as those described in “Current protocols in nucleic acid chemistry,” Beaucage, S. L. et al. (Edrs.), John Wiley & Sons, Inc., New York, NY, USA, which is hereby incorporated herein by reference. Modifications include, for example, end modifications, e.g., 5′-end modifications (phosphorylation, conjugation, inverted linkages) or 3′-end modifications (conjugation, DNA nucleotides, inverted linkages, etc.); base modifications, e.g., replacement with stabilizing bases, destabilizing bases, or bases that base pair with an expanded repertoire of partners, removal of bases (abasic nucleotides), or conjugated bases; sugar modifications (e.g., at the 2′-position or 4′-position) or replacement of the sugar; or backbone modifications, including modification or replacement of the phosphodiester linkages. Specific examples of iRNA compounds useful in the embodiments described herein include, but are not limited to RNAs containing modified backbones or no natural internucleoside linkages. RNAs having modified backbones include, among others, those that do not have a phosphorus atom in the backbone. For the purposes of this specification, and as sometimes referenced in the art, modified RNAs that do not have a phosphorus atom in their internucleoside backbone can also be considered to be oligonucleosides. In some embodiments, a modified iRNA will have a phosphorus atom in its internucleoside backbone.

[0199] Modified RNA backbones include, for example, phosphorothioates, chiral phosphorothioates, phosphorodithioates, phosphotriesters, aminoalkylphosphotriesters, methyl and other alkyl phosphonates including 3-alkylene phosphonates and chiral phosphonates, phosphinates, phosphoramidates including 3′-amino phosphoramidate and aminoalkylphosphoramidates, thionophosphoramidates, thionoalkylphosphonates, thionoalkylphosphotriesters, and boranophosphates having normal 3′-5′ linkages, 2′-5′-linked analogs of these, and those having inverted polarity wherein the adjacent pairs of nucleoside units are linked 3′-5′ to 5′-3′ or 2′-5′ to 5′-2′. Various salts, mixed salts and free acid forms are also included. In some embodiments of the invention, the dsRNA agents of the invention are in a free acid form. In other embodiments of the invention, the dsRNA agents of the invention are in a salt form. In one embodiment, the dsRNA agents of the invention are in a sodium salt form. In certain embodiments, when the dsRNA agents of the invention are in the sodium salt form, sodium ions are present in the agent as counterions for substantially all of the phosphodiester and/or phosphorothiotate groups present in the agent. Agents in which substantially all of the phosphodiester and/or phosphorothioate linkages have a sodium counterion include not more than 5, 4, 3, 2, or 1 phosphodiester and/or phosphorothioate linkages without a sodium counterion. In some embodiments, when the dsRNA agents of the invention are in the sodium salt form, sodium ions are present in the agent as counterions for all of the phosphodiester and/or phosphorothiotate groups present in the agent.

[0200] Representative U.S. patents that teach the preparation of the above phosphorus-containing linkages include, but are not limited to, U.S. Pat. Nos. 3,687,808; 4,469,863; 4,476,301; 5,023,243; 5,177,195; 5,188,897; 5,264,423; 5,276,019; 5,278,302; 5,286,717; 5,321,131; 5,399,676; 5,405,939; 5,453,496; 5,455,233; 5,466,677; 5,476,925; 5,519,126; 5,536,821; 5,541,316; 5,550,111; 5,563,253; 5,571,799; 5,587,361; 5,625,050; 6,028,188; 6,124,445; 6,160,109; 6,169,170; 6,172,209; 6,239,265; 6,277,603; 6,326,199; 6,346,614; 6,444,423; 6,531,590; 6,534,639; 6,608,035; 6,683,167; 6,858,715; 6,867,294; 6,878,805; 7,015,315; 7,041,816; 7,273,933; 7,321,029; and U.S. Pat. RE39464, the entire contents of each of which are hereby incorporated herein by reference.

[0201] Modified RNA backbones that do not include a phosphorus atom therein have backbones that are formed by short chain alkyl or cycloalkyl internucleoside linkages, mixed heteroatoms and alkyl or cycloalkyl internucleoside linkages, or one or more short chain heteroatomic or heterocyclic internucleoside linkages. These include those having morpholino linkages (formed in part from the sugar portion of a nucleoside); siloxane backbones; sulfide, sulfoxide and sulfone backbones; formacetyl and thioformacetyl backbones; methylene formacetyl and thioformacetyl backbones; alkene containing backbones; sulfamate backbones; methyleneimino and methylenehydrazino backbones; sulfonate and sulfonamide backbones; amide backbones; and others having mixed N, O, S, and CH₂ component parts.

[0202] Representative U.S. patents that teach the preparation of the above oligonucleosides include, but are not limited to, U.S. Pat. Nos. 5,034,506; 5,166,315; 5,185,444; 5,214,134; 5,216,141; 5,235,033; 5,64,562; 5,264,564; 5,405,938; 5,434,257; 5,466,677; 5,470,967; 5,489,677; 5,541,307; 5,561,225; 5,596,086; 5,602,240; 5,608,046; 5,610,289; 5,618,704; 5,623,070; 5,663,312; 5,633,360; 5,677,437; and 5,677,439, the entire contents of each of which are hereby incorporated herein by reference.

[0203] Suitable RNA mimetics are contemplated for use in iRNAs provided herein, in which both the sugar and the internucleoside linkage, i.e., the backbone, of the nucleotide units are replaced with novel groups. The base units are maintained for hybridization with an appropriate nucleic acid target compound. One such oligomeric compound in which an RNA mimetic that has been shown to have excellent hybridization properties is referred to as a peptide nucleic acid (PNA). In PNA compounds, the sugar backbone of an RNA is replaced with an amide containing backbone, in particular an aminoethylglycine backbone. The nucleobases are retained and are bound directly or indirectly to aza nitrogen atoms of the amide portion of the backbone. Representative US patents that teach the preparation of PNA compounds include, but are not limited to, U.S. Pat. Nos. 5,539,082; 5,714,331; and 5,719,262, the entire contents of each of which are hereby incorporated herein by reference. Additional PNA compounds suitable for use in the iRNAs of the invention are described in, for example, in Nielsen et al., Science, 1991, 254, 1497-1500.

[0204] Some embodiments featured in the disclosure include RNAs with phosphorothioate backbones and oligonucleosides with heteroatom backbones, and in particular —CH₂—NH—CH₂—, —CH₂—N(CH₃)—O—CH₂—[known as a methylene (methylimino) or MMI backbone], —CH₂—O—N(CH₃)—CH₂—, —CH₂—N(CH₃)—N(CH₃)—CH₂— and —N(CH₃)—CH₂—CH₂— of the above-referenced U.S. Pat. No. 5,489,677, and the amide backbones of the above-referenced U.S. Pat. No. 5,602,240. In some embodiments, the RNAs featured herein have morpholino backbone structures of the above-referenced U.S. Pat. No. 5,034,506. The native phosphodiester backbone can be represented as O—P(O)(OH)—OCH2-.

[0205] Modified RNAs can also contain one or more substituted sugar moieties. The RNAi agents, e.g., dsRNAs, featured herein can include one of the following at the 2′-position: OH; F; O-, S-, or N-alkyl; O-, S-, or N-alkenyl; O-, S- or N-alkynyl; or O-alkyl-O-alkyl, wherein the alkyl, alkenyl and alkynyl can be substituted or unsubstituted C₁ to C₁₀ alkyl or C₂ to C₁₀ alkenyl and alkynyl. Exemplary suitable modifications include O[(CH₂)ₙO]ₘCH₃, O(CH₂)·ₙOCH₃, O(CH₂)ₙNH₂, O(CH₂)ₙCH₃, O(CH₂)ₙONH₂, and O(CH₂)ₙON[(CH₂)ₙCH₃)]₂, where n and m are from 1 to about 10. In other embodiments, dsRNAs include one of the following at the 2′ position: C₁ to C₁₀ lower alkyl, substituted lower alkyl, alkaryl, aralkyl, O-alkaryl or O-aralkyl, SH, SCH₃, OCN, Cl, Br, CN, CF₃, OCF₃, SOCH₃, SO₂CH₃, ONO₂, NO₂, N₃, NH₂, heterocycloalkyl, heterocycloalkaryl, aminoalkylamino, polyalkylamino, substituted silyl, an RNA cleaving group, a reporter group, an intercalator, a group for improving the pharmacokinetic properties of a RNAi agent, or a group for improving the pharmacodynamic properties of a RNAi agent, and other substituents having similar properties. In some embodiments, the modification includes a 2′-methoxyethoxy (2′-O—CH₂CH₂OCH₃, also known as 2′-O-(2-methoxyethyl) or 2′-MOE) (Martin et al., Helv. Chim. Acta, 1995, 78:486-504) i.e., an alkoxy-alkoxy group. Another exemplary modification is 2′-dimethylaminooxyethoxy, i.e., a O(CH₂)₂ON(CH₃)₂ group, also known as 2′-DMAOE, as described in examples herein below, and 2′-dimethylaminoethoxyethoxy (also known in the art as 2′-O-dimethylaminoethoxyethyl or 2′-DMAEOE), i.e., 2′-O—CH₂—O—CH₂—N(CH₃)₂. Further exemplary modifications include: 5′-Me-2′-F nucleotides, 5′-Me-2′-OMe nucleotides, 5′-Me-2′-deoxynucleotides, (both R and S isomers in these three families); 2′-alkoxyalkyl; and 2′-NMA (N-methylacetamide).

[0206] Other modifications include 2′-methoxy (2′-OCH₃), 2-aminopropoxy (2′-OCH₂CH₂CH₂NH₂) and 2′-fluoro (2′-F). Similar modifications can also be made at other positions on the RNA of an iRNA, particularly the 3′ position of the sugar on the 3′ terminal nucleotide or in 2′-5′ linked dsRNAs and the 5′ position of 5′ terminal nucleotide. iRNAs can also have sugar mimetics such as cyclobutyl moieties in place of the pentofuranosyl sugar. Representative US patents that teach the preparation of such modified sugar structures include, but are not limited to, U.S. Pat. Nos. 4,981,957; 5,118,800; 5,319,080; 5,359,044; 5,393,878; 5,446,137; 5,466,786; 5,514,785; 5,519,134; 5,567,811; 5,576,427; 5,591,722; 5,597,909; 5,610,300; 5,627,053; 5,639,873; 5,646,265; 5,658,873; 5,670,633; and 5,700,920, certain of which are commonly owned with the instant application. The entire contents of each of the foregoing are hereby incorporated herein by reference.

[0207] An iRNA can also include nucleobase (often referred to in the art simply as “base”) modifications or substitutions. As used herein, “unmodified” or “natural” nucleobases include the purine bases adenine (A) and guanine (G), and the pyrimidine bases thymine (T), cytosine (C), and uracil (U). Modified nucleobases include other synthetic and natural nucleobases such as deoxythymidine (dT), 5-methylcytosine (5-me-C), 5-hydroxymethyl cytosine, xanthine, hypoxanthine, 2-aminoadenine, 6-methyl and other alkyl derivatives of adenine and guanine, 2-propyl and other alkyl derivatives of adenine and guanine, 2-thiouracil, 2-thiothymine and 2-thiocytosine, 5-halouracil and cytosine, 5-propynyl uracil and cytosine, 6-azo uracil, cytosine and thymine, 5-uracil (pseudouracil), 4-thiouracil, 8-halo, 8-amino, 8-thiol, 8-thioalkyl, 8-hydroxyl anal other 8-substituted adenines and guanines, 5-halo, particularly 5-bromo, 5-trifluoromethyl and other 5-substituted uracils and cytosines, 7-methylguanine and 7-methyladenine, 8-azaguanine and 8-azaadenine, 7-deazaguanine and 7-daazaadenine and 3-deazaguanine and 3-deazaadenine. Further nucleobases include those disclosed in U.S. Pat. No. 3,687,808, those disclosed in Modified Nucleosides in Biochemistry, Biotechnology and Medicine, Herdewijn, P. ed. Wiley-VCH, 2008; those disclosed in The Concise Encyclopedia Of Polymer Science And Engineering, pages 858-859, Kroschwitz, J. L, ed. John Wiley & Sons, 1990, these disclosed by Englisch et al., Angewandte Chemie, International Edition, 1991, 30, 613, and those disclosed by Sanghvi, Y S., Chapter 15, dsRNA Research and Applications, pages 289-302, Crooke, S. T. and Lebleu, B., Ed., CRC Press, 1993. Certain of these nucleobases are particularly useful for increasing the binding affinity of the oligomeric compounds featured in the invention. These include 5-substituted pyrimidines, 6-azapyrimidines and N-2, N-6 and 0-6 substituted purines, including 2-aminopropyladenine, 5-propynyluracil and 5-propynylcytosine. 5-methylcytosine substitutions have been shown to increase nucleic acid duplex stability by 0.6-1.2° C. (Sanghvi, Y. S., Crooke, S. T. and Lebleu, B., Eds., dsRNA Research and Applications, CRC Press, Boca Raton, 1993, pp. 276-278) and are exemplary base substitutions, even more particularly when combined with 2′-O-methoxyethyl sugar modifications.

[0208] Representative U.S. patents that teach the preparation of certain of the above noted modified nucleobases as well as other modified nucleobases include, but are not limited to, the above noted U.S. Pat. Nos. 3,687,808, 4,845,205; 5,130,30; 5,134,066; 5,175,273; 5,367,066; 5,432,272; 5,457,187; 5,459,255; 5,484,908; 5,502,177; 5,525,711; 5,552,540; 5,587,469; 5,594,121, 5,596,091; 5,614,617; 5,681,941; 5,750,692; 6,015,886; 6,147,200; 6,166,197; 6,222,025; 6,235,887; 6,380,368; 6,528,640; 6,639,062; 6,617,438; 7,045,610; 7,427,672; and 7,495,088, the entire contents of each of which are hereby incorporated herein by reference.

[0209] An RNAi agent of the disclosure can also be modified to include one or more bicyclic sugar moities. A “bicyclic sugar” is a furanosyl ring modified by a ring formed by the bridging of two carbons, whether adjacent or non-adjacent atoms. A “bicyclic nucleoside” (“BNA”) is a nucleoside having a sugar moiety comprising a ring formed by bridging comprising a bridge connecting two carbons, whether adjacent or non-adjacent, two carbon atoms of the sugar ring, thereby forming a bicyclic ring system. In certain embodiments, the bridge connects the 4′-carbon and the 2′-carbon of the sugar ring, optionally, via the 2′-acyclic oxygen atom. Thus, in some embodiments an agent of the disclosure may include one or more locked nucleic acids (LNA). A locked nucleic acid is a nucleotide having a modified ribose moiety in which the ribose moiety comprises an extra bridge connecting the 2′ and 4′ carbons. In other words, an LNA is a nucleotide comprising a bicyclic sugar moiety comprising a 4′-CH2-O-2′ bridge. This structure effectively “locks” the ribose in the 3′-endo structural conformation. The addition of locked nucleic acids to siRNAs has been shown to increase siRNA stability in serum, and to reduce off-target effects (Elmen, J. et al., (2005) Nucleic Acids Research 33(1):439-447; Mook, O R. et al., (2007) Mol Canc Ther 6(3):833-843; Grunweller, A. et al., (2003) Nucleic Acids Research 31(12):3185-3193). Examples of bicyclic nucleosides for use in the polynucleotides of the disclosure include without limitation nucleosides comprising a bridge between the 4′ and the 2′ ribosyl ring atoms. In certain embodiments, the antisense polynucleotide agents of the disclosure include one or more bicyclic nucleosides comprising a 4′ to 2′ bridge.

[0210] A locked nucleoside can be represented by the structure (omitting stereochemistry),

[chemical structure]

[0211] wherein B is a nucleobase or modified nucleobase and L is the linking group that joins the 2′-carbon to the 4′-carbon of the ribose ring.

[0212] Examples of such 4′ to 2′ bridged bicyclic nucleosides, include but are not limited to 4′-(CH₂)—O-2′ (LNA); 4′-(CH₂)—S-2′; 4′-(CH₂)2-O-2′ (ENA); 4′-CH(CH₃)—O-2′ (also referred to as “constrained ethyl” or “cEt”) and 4′-CH(CH₂OCH₃)—O-2′ (and analogs thereof; see, e.g., U.S. Pat. No. 7,399,845); 4′-C(CH₃)(CH₃)—O-2′ (and analogs thereof; see e.g., U.S. Pat. No. 8,278,283); 4′-CH₂—N(OCH₃)-2′ (and analogs thereof; see e.g., U.S. Pat. No. 8,278,425); 4′-CH₂—O—N(CH₃)-2′ (see, e.g., U.S. Patent Publication No. 2004/0171570); 4′-CH₂—N(R)—O-2′, wherein R is H, C1-C12 alkyl, or a nitrogen protecting group (see, e.g., U.S. Pat. No. 7,427,672); 4′-CH₂—C(H)(CH₃)-2′ (see, e.g., Chattopadhyaya et al., J. Org. Chem., 2009, 74, 118-134); and 4′-CH₂—C(═CH₂)-2′ (and analogs thereof; see, e.g., U.S. Pat. No. 8,278,426). The entire contents of each of the foregoing are hereby incorporated herein by reference.

[0213] Additional representative U.S. patents and U.S. patent publications that teach the preparation of locked nucleic acid nucleotides include, but are not limited to, the following: U.S. Pat. Nos. 6,268,490; 6,525,191; 6,670,461; 6,770,748; 6,794,499; 6,998,484; 7,053,207; 7,034,133; 7,084,125; 7,399,845; 7,427,672; 7,569,686; 7,741,457; 8,022,193; 8,030,467; 8,278,425; 8,278,426; 8,278,283; US 2008/0039618; and US 2009/0012281, the entire contents of each of which are hereby incorporated herein by reference.

[0214] Any of the foregoing bicyclic nucleosides can be prepared having one or more stereochemical sugar configurations including for example α-L-ribofuranose and β-D-ribofuranose (see WO 99/14226).

[0215] An RNAi agent of the disclosure can also be modified to include one or more constrained ethyl nucleotides. As used herein, a “constrained ethyl nucleotide” or “cEt” is a locked nucleic acid comprising a bicyclic sugar moiety comprising a 4′-CH(CH3)-O-2′ bridge (i.e., L in the preceding structure). In one embodiment, a constrained ethyl nucleotide is in the S conformation referred to herein as “S-cEt.”

[0216] An iRNA of the invention may also include one or more “conformationally restricted nucleotides” (“CRN”). CRN are nucleotide analogs with a linker connecting the C2′ and C4′ carbons of ribose or the KHK and —C5′ carbons of ribose. CRN lock the ribose ring into a stable conformation and increase the hybridization affinity to mRNA. The linker is of sufficient length to place the oxygen in an optimal position for stability and affinity resulting in less ribose ring puckering.

[0217] Representative publications that teach the preparation of certain of the above noted CRN include, but are not limited to, U.S. Patent Publication No. 2013/0190383; and PCT publication WO 2013/036868, the entire contents of each of which are hereby incorporated herein by reference.

[0218] In some embodiments, an iRNA of the invention comprises one or more monomers that are UNA (unlocked nucleic acid) nucleotides. UNA is unlocked acyclic nucleic acid, wherein any of the bonds of the sugar has been removed, forming an unlocked “sugar” residue. In one example, UNA also encompasses monomer with bonds between C1′-C4′ have been removed (i.e. the covalent carbon-oxygen-carbon bond between the C1′ and C4′ carbons). In another example, the C2′-KHK′ bond (i.e. the covalent carbon-carbon bond between the C2′ and KHK′ carbons) of the sugar has been removed (see Nuc. Acids Symp. Series, 52, 133-134 (2008) and Fluiter et al., Mol. Biosyst., 2009, 10, 1039 hereby incorporated by reference).

[0219] Representative U.S. publications that teach the preparation of UNA include, but are not limited to, U.S. Pat. No. 8,314,227; and U.S. Patent Publication Nos. 2013/0096289; 2013/0011922; and 2011/0313020, the entire contents of each of which are hereby incorporated herein by reference.

[0220] Potentially stabilizing modifications to the ends of RNA molecules can include N-(acetylaminocaproyl)-4-hydroxyprolinol (Hyp-C6-NHAc), N-(caproyl-4-hydroxyprolinol (Hyp-C6), N-(acetyl-4-hydroxyprolinol (Hyp-NHAc), thymidine-2′-O-deoxythymidine (ether), N-(aminocaproyl)-4-hydroxyprolinol (Hyp-C6-amino), 2-docosanoyl-uridine-3′-phosphate, inverted base dT(idT) and others. Disclosure of this modification can be found in WO 2011/005861.

[0221] Other modifications of the nucleotides of an iRNA of the invention include a 5′ phosphate or 5′ phosphate mimic, e.g., a 5′-terminal phosphate or phosphate mimic on the antisense strand of an iRNA. Suitable phosphate mimics are disclosed in, for example U.S. Patent Publication No. 2012/0157511, the entire contents of which are incorporated herein by reference.

[0222] A. Modified iRNAs Comprising Motifs of the Invention

[0223] In certain aspects of the invention, the double stranded RNA agents of the invention include agents with chemical modifications as disclosed, for example, in WO2013/075035, the entire contents of each of which are incorporated herein by reference. WO2013/075035 provides motifs of three identical modifications on three consecutive nucleotides may be introduced into a sense strand or antisense strand of a dsRNAi agent, particularly at or near the cleavage site. In some embodiments, the sense strand and antisense strand of the dsRNAi agent may otherwise be completely modified. The introduction of these motifs interrupts the modification pattern, if present, of the sense or antisense strand. The dsRNAi agent may be optionally conjugated with a GalNAc derivative ligand, for instance on the sense strand.

[0224] More specifically, when the sense strand and antisense strand of the double stranded RNA agent are completely modified to have one or more motifs of three identical modifications on three consecutive nucleotides at or near the cleavage site of at least one strand of a dsRNAi agent.

[0225] Accordingly, the invention provides double stranded RNA agents capable of inhibiting the expression of a target gene (i.e., KHK gene) in vivo. The RNAi agent comprises a sense strand and an antisense strand. Each strand of the RNAi agent may be, for example, 17-30 nucleotides in length, 25-30 nucleotides in length, 27-30 nucleotides in length, 19-25 nucleotides in length, 19-23 nucleotides in length, 19-21 nucleotides in length, 21-25 nucleotides in length, or 21-23 nucleotides in length.

[0226] The sense strand and antisense strand typically form a duplex double stranded RNA (“dsRNA”), also referred to herein as “dsRNAi agent.” The duplex region of a dsRNAi agent may be, for example, the duplex region can be 27-30 nucleotide pairs in length, 19-25 nucleotide pairs in length, 19-23 nucleotide pairs in length, 19-21 nucleotide pairs in length, 21-25 nucleotide pairs in length, or 21-23 nucleotide pairs in length. In another example, the duplex region is selected from 19, 20, 21, 22, 23, 24, 25, 26, and 27 nucleotides in length.

[0227] In certain embodiments, the dsRNAi agent may contain one or more overhang regions or capping groups at the 3′-end, 5′-end, or both ends of one or both strands. The overhang can be, independently, 1-6 nucleotides in length, for instance 2-6 nucleotides in length, 1-5 nucleotides in length, 2-5 nucleotides in length, 1-4 nucleotides in length, 2-4 nucleotides in length, 1-3 nucleotides in length, 2-3 nucleotides in length, or 1-2 nucleotides in length. In certain embodiments, the overhang regions can include extended overhang regions as provided above. The overhangs can be the result of one strand being longer than the other, or the result of two strands of the same length being staggered. The overhang can form a mismatch with the target mRNA or it can be complementary to the gene sequences being targeted or can be another sequence. The first and second strands can also be joined, e.g., by additional bases to form a hairpin, or by other non-base linkers.

[0228] In certain embodiments, the nucleotides in the overhang region of the dsRNAi agent can each independently be a modified or unmodified nucleotide including, but no limited to 2′-sugar modified, such as, 2′-F, 2′-O-methyl, thymidine (T), 2′-O-methoxyethyl-5-methyluridine (Teo), 2′-O-methoxyethyladenosine (Aeo), 2′-O-methoxyethyl-5-methylcytidine (m5Ceo), and any combinations thereof.

[0229] For example, TT can be an overhang sequence for either end on either strand. The overhang can form a mismatch with the target mRNA or it can be complementary to the gene sequences being targeted or can be another sequence.

[0230] The 5′- or 3′-overhangs at the sense strand, antisense strand, or both strands of the dsRNAi agent may be phosphorylated. In some embodiments, the overhang region(s) contains two nucleotides having a phosphorothioate between the two nucleotides, where the two nucleotides can be the same or different. In some embodiments, the overhang is present at the 3′-end of the sense strand, antisense strand, or both strands. In some embodiments, this 3′-overhang is present in the antisense strand. In some embodiments, this 3′-overhang is present in the sense strand.

[0231] The dsRNAi agent may contain only a single overhang, which can strengthen the interference activity of the RNAi, without affecting its overall stability. For example, the single-stranded overhang may be located at the 3′-end of the sense strand or, alternatively, at the 3-end of the antisense strand. The RNAi may also have a blunt end, located at the 5′-end of the antisense strand (or the 3′-end of the sense strand) or vice versa. Generally, the antisense strand of the dsRNAi agent has a nucleotide overhang at the 3′-end, and the 5′-end is blunt. While not wishing to be bound by theory, the asymmetric blunt end at the 5′-end of the antisense strand and 3′-end overhang of the antisense strand favor the guide strand loading into RISC process.

[0232] In certain embodiments, the dsRNAi agent is a double ended blunt-ended of 19 nucleotides in length, wherein the sense strand contains at least one motif of three 2′-F modifications on three consecutive nucleotides at positions 7, 8, 9 from the 5′end. The antisense strand contains at least one motif of three 2′-O-methyl modifications on three consecutive nucleotides at positions 11, 12, 13 from the 5′end.

[0233] In other embodiments, the dsRNAi agent is a double ended blunt-ended of 20 nucleotides in length, wherein the sense strand contains at least one motif of three 2′-F modifications on three consecutive nucleotides at positions 8, 9, 10 from the 5′end. The antisense strand contains at least one motif of three 2′-O-methyl modifications on three consecutive nucleotides at positions 11, 12, 13 from the 5′end.

[0234] In yet other embodiments, the dsRNAi agent is a double ended blunt-ended of 21 nucleotides in length, wherein the sense strand contains at least one motif of three 2′-F modifications on three consecutive nucleotides at positions 9, 10, 11 from the 5′end. The antisense strand contains at least one motif of three 2′-O-methyl modifications on three consecutive nucleotides at positions 11, 12, 13 from the 5′end.

[0235] In certain embodiments, the dsRNAi agent comprises a 21 nucleotide sense strand and a 23 nucleotide antisense strand, wherein the sense strand contains at least one motif of three 2′-F modifications on three consecutive nucleotides at positions 9, 10, 11 from the 5′end; the antisense strand contains at least one motif of three 2′-O-methyl modifications on three consecutive nucleotides at positions 11, 12, 13 from the 5′end, wherein one end of the RNAi agent is blunt, while the other end comprises a 2 nucleotide overhang. In some embodiments, the 2 nucleotide overhang is at the 3′-end of the antisense strand.

[0236] When the 2 nucleotide overhang is at the 3′-end of the antisense strand, there may be two phosphorothioate internucleotide linkages between the terminal three nucleotides, wherein two of the three nucleotides are the overhang nucleotides, and the third nucleotide is a paired nucleotide next to the overhang nucleotide. In one embodiment, the RNAi agent additionally has two phosphorothioate internucleotide linkages between the terminal three nucleotides at both the 5′-end of the sense strand and at the 5′-end of the antisense strand. In certain embodiments, every nucleotide in the sense strand and the antisense strand of the dsRNAi agent, including the nucleotides that are part of the motifs are modified nucleotides. In certain embodiments each residue is independently modified with a 2′-O-methyl or 3′-fluoro, e.g., in an alternating motif. Optionally, the dsRNAi agent further comprises a ligand (such as GalNAc).

[0237] In certain embodiments, the dsRNAi agent comprises a sense and an antisense strand, wherein the sense strand is 25-30 nucleotide residues in length, wherein starting from the 5′ terminal nucleotide (position 1) positions 1 to 23 of the first strand comprise at least 8 ribonucleotides; the antisense strand is 36-66 nucleotide residues in length and, starting from the 3′ terminal nucleotide, comprises at least 8 ribonucleotides in the positions paired with positions 1-23 of sense strand to form a duplex; wherein at least the 3′ terminal nucleotide of antisense strand is unpaired with sense strand, and up to 6 consecutive 3′ terminal nucleotides are unpaired with sense strand, thereby forming a 3′ single stranded overhang of 1-6 nucleotides; wherein the 5′ terminus of antisense strand comprises from 10-30 consecutive nucleotides which are unpaired with sense strand, thereby forming a 10-30 nucleotide single stranded 5′ overhang; wherein at least the sense strand 5′ terminal and 3′ terminal nucleotides are base paired with nucleotides of antisense strand when sense and antisense strands are aligned for maximum complementarity, thereby forming a substantially duplexed region between sense and antisense strands; and antisense strand is sufficiently complementary to a target RNA along at least 19 ribonucleotides of antisense strand length to reduce target gene expression when the double stranded nucleic acid is introduced into a mammalian cell; and wherein the sense strand contains at least one motif of three 2′-F modifications on three consecutive nucleotides, where at least one of the motifs occurs at or near the cleavage site. The antisense strand contains at least one motif of three 2′-O-methyl modifications on three consecutive nucleotides at or near the cleavage site.

[0238] In certain embodiments, the dsRNAi agent comprises sense and antisense strands, wherein the dsRNAi agent comprises a first strand having a length which is at least 25 and at most 29 nucleotides and a second strand having a length which is at most 30 nucleotides with at least one motif of three 2′-O-methyl modifications on three consecutive nucleotides at position 11, 12, 13 from the 5′ end; wherein the 3′ end of the first strand and the 5′ end of the second strand form a blunt end and the second strand is 1-4 nucleotides longer at its 3′ end than the first strand, wherein the duplex region which is at least 25 nucleotides in length, and the second strand is sufficiently complementary to a target mRNA along at least 19 nucleotide of the second strand length to reduce target gene expression when the RNAi agent is introduced into a mammalian cell, and wherein Dicer cleavage of the dsRNAi agent preferentially results in an siRNA comprising the 3′-end of the second strand, thereby reducing expression of the target gene in the mammal. Optionally, the dsRNAi agent further comprises a ligand.

[0239] In certain embodiments, the sense strand of the dsRNAi agent contains at least one motif of three identical modifications on three consecutive nucleotides, where one of the motifs occurs at the cleavage site in the sense strand.

[0240] In certain embodiments, the antisense strand of the dsRNAi agent can also contain at least one motif of three identical modifications on three consecutive nucleotides, where one of the motifs occurs at or near the cleavage site in the antisense strand.

[0241] For a dsRNAi agent having a duplex region of 19-23 nucleotides in length, the cleavage site of the antisense strand is typically around the 10, 11, and 12 positions from the 5′-end. Thus the motifs of three identical modifications may occur at the 9, 10, 11 positions; the 10, 11, 12 positions; the 11, 12, 13 positions; the 12, 13, 14 positions; or the 13, 14, 15 positions of the antisense strand, the count starting from the first nucleotide from the 5′-end of the antisense strand, or, the count starting from the first paired nucleotide within the duplex region from the 5′-end of the antisense strand. The cleavage site in the antisense strand may also change according to the length of the duplex region of the dsRNAi agent from the 5′-end.

[0242] The sense strand of the dsRNAi agent may contain at least one motif of three identical modifications on three consecutive nucleotides at the cleavage site of the strand; and the antisense strand may have at least one motif of three identical modifications on three consecutive nucleotides at or near the cleavage site of the strand. When the sense strand and the antisense strand form a dsRNA duplex, the sense strand and the antisense strand can be so aligned that one motif of the three nucleotides on the sense strand and one motif of the three nucleotides on the antisense strand have at least one nucleotide overlap, i.e., at least one of the three nucleotides of the motif in the sense strand forms a base pair with at least one of the three nucleotides of the motif in the antisense strand. Alternatively, at least two nucleotides may overlap, or all three nucleotides may overlap.

[0243] In some embodiments, the sense strand of the dsRNAi agent may contain more than one motif of three identical modifications on three consecutive nucleotides. The first motif may occur at or near the cleavage site of the strand and the other motifs may be a wing modification. The term “wing modification” herein refers to a motif occurring at another portion of the strand that is separated from the motif at or near the cleavage site of the same strand. The wing modification is either adjacent to the first motif or is separated by at least one or more nucleotides. When the motifs are immediately adjacent to each other then the chemistries of the motifs are distinct from each other, and when the motifs are separated by one or more nucleotide than the chemistries can be the same or different. Two or more wing modifications may be present. For instance, when two wing modifications are present, each wing modification may occur at one end relative to the first motif which is at or near cleavage site or on either side of the lead motif.

[0244] Like the sense strand, the antisense strand of the dsRNAi agent may contain more than one motifs of three identical modifications on three consecutive nucleotides, with at least one of the motifs occurring at or near the cleavage site of the strand. This antisense strand may also contain one or more wing modifications in an alignment similar to the wing modifications that may be present on the sense strand.

[0245] In some embodiments, the wing modification on the sense strand or antisense strand of the dsRNAi agent typically does not include the first one or two terminal nucleotides at the 3′-end, 5′-end, or both ends of the strand.

[0246] In other embodiments, the wing modification on the sense strand or antisense strand of the dsRNAi agent typically does not include the first one or two paired nucleotides within the duplex region at the 3′-end, 5′-end, or both ends of the strand.

[0247] When the sense strand and the antisense strand of the dsRNAi agent each contain at least one wing modification, the wing modifications may fall on the same end of the duplex region, and have an overlap of one, two, or three nucleotides.

[0248] When the sense strand and the antisense strand of the dsRNAi agent each contain at least two wing modifications, the sense strand and the antisense strand can be so aligned that two modifications each from one strand fall on one end of the duplex region, having an overlap of one, two, or three nucleotides; two modifications each from one strand fall on the other end of the duplex region, having an overlap of one, two or three nucleotides; two modifications one strand fall on each side of the lead motif, having an overlap of one, two or three nucleotides in the duplex region.

[0249] In some embodiments, every nucleotide in the sense strand and antisense strand of the dsRNAi agent, including the nucleotides that are part of the motifs, may be modified. Each nucleotide may be modified with the same or different modification which can include one or more alteration of one or both of the non-linking phosphate oxygens or of one or more of the linking phosphate oxygens; alteration of a constituent of the ribose sugar, e.g., of the 2′-hydroxyl on the ribose sugar; wholesale replacement of the phosphate moiety with “dephospho” linkers; modification or replacement of a naturally occurring base; and replacement or modification of the ribose-phosphate backbone.

[0250] As nucleic acids are polymers of subunits, many of the modifications occur at a position which is repeated within a nucleic acid, e.g., a modification of a base, or a phosphate moiety, or a non-linking O of a phosphate moiety. In some cases the modification will occur at all of the subject positions in the nucleic acid but in many cases it will not. By way of example, a modification may only occur at a 3′- or 5′ terminal position, may only occur in a terminal region, e.g., at a position on a terminal nucleotide or in the last 2, 3, 4, 5, or 10 nucleotides of a strand. A modification may occur in a double strand region, a single strand region, or in both. A modification may occur only in the double strand region of an RNA or may only occur in a single strand region of a RNA. For example, a phosphorothioate modification at a non-linking O position may only occur at one or both termini, may only occur in a terminal region, e.g., at a position on a terminal nucleotide or in the last 2, 3, 4, 5, or 10 nucleotides of a strand, or may occur in double strand and single strand regions, particularly at termini. The 5′-end or ends can be phosphorylated.

[0251] It may be possible, e.g., to enhance stability, to include particular bases in overhangs, or to include modified nucleotides or nucleotide surrogates, in single strand overhangs, e.g., in a 5′- or 3′-overhang, or in both. For example, it can be desirable to include purine nucleotides in overhangs. In some embodiments all or some of the bases in a 3′- or 5′-overhang may be modified, e.g., with a modification described herein. Modifications can include, e.g., the use of modifications at the 2′ position of the ribose sugar with modifications that are known in the art, e.g., the use of deoxyribonucleotides, 2′-deoxy-2′-fluoro (2′-F) or 2′-O-methyl modified instead of the ribosugar of the nucleobase, and modifications in the phosphate group, e.g., phosphorothioate modifications. Overhangs need not be homologous with the target sequence.

[0252] In some embodiments, each residue of the sense strand and antisense strand is independently modified with LNA, CRN, cET, UNA, glycol nucleic acid (GNA), hexitol nucleic acid (HNA), 2′-methoxyethyl, 2′-O-methyl, 2′-O-allyl, 2′-C-allyl, 2′-deoxy, 2′-hydroxyl, or 2′-fluoro. The strands can contain more than one modification. In one embodiment, each residue of the sense strand and antisense strand is independently modified with 2′-O-methyl or 2′-fluoro.

[0253] At least two different modifications are typically present on the sense strand and antisense strand. Those two modifications may be the 2′-O-methyl or 2′-fluoro modifications, or others.

[0254] In certain embodiments, the Nₐ or N_{b} comprise modifications of an alternating pattern. The term “alternating motif” as used herein refers to a motif having one or more modifications, each modification occurring on alternating nucleotides of one strand. The alternating nucleotide may refer to one per every other nucleotide or one per every three nucleotides, or a similar pattern. For example, if A, B and C each represent one type of modification to the nucleotide, the alternating motif can be “ABABABABABAB . . . ,” “AABBAABBAABB . . . ,” “AABAABAABAAB . . . ,” “AAABAAABAAAB . . . ,” “AAABBBAAABBB . . . ,” or “ABCABCABCABC . . . ,” etc.

[0255] The type of modifications contained in the alternating motif may be the same or different. For example, if A, B, C, D each represent one type of modification on the nucleotide, the alternating pattern, i.e., modifications on every other nucleotide, may be the same, but each of the sense strand or antisense strand can be selected from several possibilities of modifications within the alternating motif such as “ABABAB . . . ”, “ACACAC . . . ” “BDBDBD . . . ” or “CDCDCD . . . ,” etc.

[0256] In some embodiments, the dsRNAi agent of the invention comprises the modification pattern for the alternating motif on the sense strand relative to the modification pattern for the alternating motif on the antisense strand is shifted. The shift may be such that the modified group of nucleotides of the sense strand corresponds to a differently modified group of nucleotides of the antisense strand and vice versa. For example, the sense strand when paired with the antisense strand in the dsRNA duplex, the alternating motif in the sense strand may start with “ABABAB” from 5′ to 3′ of the strand and the alternating motif in the antisense strand may start with “BABABA” from 5′ to 3′ of the strand within the duplex region. As another example, the alternating motif in the sense strand may start with “AABBAABB” from 5′ to 3′ of the strand and the alternating motif in the antisense strand may start with “BBAABBAA” from 5′ to 3′ of the strand within the duplex region, so that there is a complete or partial shift of the modification patterns between the sense strand and the antisense strand.

[0257] In some embodiments, the dsRNAi agent comprises the pattern of the alternating motif of 2′-O-methyl modification and 2′-F modification on the sense strand initially has a shift relative to the pattern of the alternating motif of 2′-O-methyl modification and 2′-F modification on the antisense strand initially, i.e., the 2′-O-methyl modified nucleotide on the sense strand base pairs with a 2′-F modified nucleotide on the antisense strand and vice versa. The 1 position of the sense strand may start with the 2′-F modification, and the 1 position of the antisense strand may start with the 2′-O-methyl modification.

[0258] The introduction of one or more motifs of three identical modifications on three consecutive nucleotides to the sense strand or antisense strand interrupts the initial modification pattern present in the sense strand or antisense strand. This interruption of the modification pattern of the sense or antisense strand by introducing one or more motifs of three identical modifications on three consecutive nucleotides to the sense or antisense strand may enhance the gene silencing activity against the target gene.

[0259] In some embodiments, when the motif of three identical modifications on three consecutive nucleotides is introduced to any of the strands, the modification of the nucleotide next to the motif is a different modification than the modification of the motif. For example, the portion of the sequence containing the motif is “ . . . NₐYYYN_{b} . . . ,” where “Y” represents the modification of the motif of three identical modifications on three consecutive nucleotide, and “Nₐ” and “N_{b}” represent a modification to the nucleotide next to the motif “YYY” that is different than the modification of Y, and where Nₐ and N_{b} can be the same or different modifications. Alternatively, Nₐ or N_{b} may be present or absent when there is a wing modification present.

[0260] The iRNA may further comprise at least one phosphorothioate or methylphosphonate internucleotide linkage. The phosphorothioate or methylphosphonate internucleotide linkage modification may occur on any nucleotide of the sense strand, antisense strand, or both strands in any position of the strand. For instance, the internucleotide linkage modification may occur on every nucleotide on the sense strand or antisense strand; each internucleotide linkage modification may occur in an alternating pattern on the sense strand or antisense strand; or the sense strand or antisense strand may contain both internucleotide linkage modifications in an alternating pattern. The alternating pattern of the internucleotide linkage modification on the sense strand may be the same or different from the antisense strand, and the alternating pattern of the internucleotide linkage modification on the sense strand may have a shift relative to the alternating pattern of the internucleotide linkage modification on the antisense strand. In one embodiment, a double-stranded RNAi agent comprises 6-8 phosphorothioate internucleotide linkages. In some embodiments, the antisense strand comprises two phosphorothioate internucleotide linkages at the 5′-end and two phosphorothioate internucleotide linkages at the 3′-end, and the sense strand comprises at least two phosphorothioate internucleotide linkages at either the 5′-end or the 3′-end.

[0261] In some embodiments, the dsRNAi agent comprises a phosphorothioate or methylphosphonate internucleotide linkage modification in the overhang region. For example, the overhang region may contain two nucleotides having a phosphorothioate or methylphosphonate internucleotide linkage between the two nucleotides. Internucleotide linkage modifications also may be made to link the overhang nucleotides with the terminal paired nucleotides within the duplex region. For example, at least 2, 3, 4, or all the overhang nucleotides may be linked through phosphorothioate or methylphosphonate internucleotide linkage, and optionally, there may be additional phosphorothioate or methylphosphonate internucleotide linkages linking the overhang nucleotide with a paired nucleotide that is next to the overhang nucleotide. For instance, there may be at least two phosphorothioate internucleotide linkages between the terminal three nucleotides, in which two of the three nucleotides are overhang nucleotides, and the third is a paired nucleotide next to the overhang nucleotide. These terminal three nucleotides may be at the 3′-end of the antisense strand, the 3′-end of the sense strand, the 5′-end of the antisense strand, or the 5′end of the antisense strand.

[0262] In some embodiments, the 2-nucleotide overhang is at the 3′-end of the antisense strand, and there are two phosphorothioate internucleotide linkages between the terminal three nucleotides, wherein two of the three nucleotides are the overhang nucleotides, and the third nucleotide is a paired nucleotide next to the overhang nucleotide. Optionally, the dsRNAi agent may additionally have two phosphorothioate internucleotide linkages between the terminal three nucleotides at both the 5′-end of the sense strand and at the 5′-end of the antisense strand.

[0263] In one embodiment, the dsRNAi agent comprises mismatch(es) with the target, within the duplex, or combinations thereof. The mismatch may occur in the overhang region or the duplex region. The base pair may be ranked on the basis of their propensity to promote dissociation or melting (e.g., on the free energy of association or dissociation of a particular pairing, the simplest approach is to examine the pairs on an individual pair basis, though next neighbor or similar analysis can also be used). In terms of promoting dissociation: A:U is preferred over G:C; G:U is preferred over G:C; and I:C is preferred over G:C (I=inosine). Mismatches, e.g., non-canonical or other than canonical pairings (as described elsewhere herein) are preferred over canonical (A:T, A:U, G:C) pairings; and pairings which include a universal base are preferred over canonical pairings.

[0264] In certain embodiments, the dsRNAi agent comprises at least one of the first 1, 2, 3, 4, or 5 base pairs within the duplex regions from the 5′-end of the antisense strand independently selected from the group of: A:U, G:U, I:C, and mismatched pairs, e.g., non-canonical or other than canonical pairings or pairings which include a universal base, to promote the dissociation of the antisense strand at the 5′-end of the duplex.

[0265] In certain embodiments, the nucleotide at the 1 position within the duplex region from the 5′-end in the antisense strand is selected from A, dA, dU, U, and dT. Alternatively, at least one of the first 1, 2, or 3 base pair within the duplex region from the 5′-end of the antisense strand is an AU base pair. For example, the first base pair within the duplex region from the 5′-end of the antisense strand is an AU base pair.

[0266] In other embodiments, the nucleotide at the 3′-end of the sense strand is deoxythymidine (dT) or the nucleotide at the 3′-end of the antisense strand is deoxythymidine (dT). For example, there is a short sequence of deoxythymidine nucleotides, for example, two dT nucleotides on the 3′-end of the sense, antisense strand, or both strands.

[0267] In certain embodiments, the sense strand sequence may be represented by formula (I):

5′nₚ-Nₐ—(XXX)ᵢ—N_{b}—YYY—N_{b}—(ZZZ)ⱼ—Nₐ-n_{q}3′ (I)
[0268] wherein:
[0269] i and j are each independently 0 or 1;
[0270] p and q are each independently 0-6;
[0271] each Nₐ independently represents an oligonucleotide sequence comprising 0-25 modified nucleotides, each sequence comprising at least two differently modified nucleotides;
[0272] each N_{b} independently represents an oligonucleotide sequence comprising 0-10 modified nucleotides;
[0273] each nₚ and n_{q} independently represent an overhang nucleotide;
[0274] wherein Nb and Y do not have the same modification; and
[0275] XXX, YYY, and ZZZ each independently represent one motif of three identical modifications on three consecutive nucleotides. In some embodiments, YYY is all 2′-F modified nucleotides.

[0276] In some embodiments, the Nₐ or N_{b} comprises modifications of alternating pattern.

[0277] In some embodiments, the YYY motif occurs at or near the cleavage site of the sense strand.

[0278] For example, when the dsRNAi agent has a duplex region of 17-23 nucleotides in length, the YYY motif can occur at or the vicinity of the cleavage site (e.g.: can occur at positions 6, 7, 8; 7, 8, 9; 8, 9, 10; 9, 10, 11; 10, 11, 12; or 11, 12, 13) of the sense strand, the count starting from the first nucleotide, from the 5′-end; or optionally, the count starting at the first paired nucleotide within the duplex region, from the 5′-end.

[0279] In one embodiment, i is 1 and j is 0, or i is 0 and j is 1, or both i and j are 1. The sense strand can therefore be represented by the following formulas:

5′nₚ-Nₐ—YYY—N_{b}—ZZZ—Nₐ-n_{q}3′ (Ib);

5′nₚ-Nₐ—XXX—N_{b}—YYY—Nₐ-n_{q}3′ (Ic); or

5′nₚ-Nₐ—XXX—N_{b}—YYY—N_{b}—ZZZ—Nₐ-n_{q}3′ (Id).

[0280] When the sense strand is represented by formula (Ib), N_{b} represents an oligonucleotide sequence comprising 0-10, 0-7, 0-5, 0-4, 0-2, or 0 modified nucleotides. Each Nₐ independently can represent an oligonucleotide sequence comprising 2-20, 2-15, or 2-10 modified nucleotides.

[0281] When the sense strand is represented as formula (Ic), N_{b} represents an oligonucleotide sequence comprising 0-10, 0-7, 0-10, 0-7, 0-5, 0-4, 0-2, or 0 modified nucleotides. Each Nₐ can independently represent an oligonucleotide sequence comprising 2-20, 2-15, or 2-10 modified nucleotides.

[0282] When the sense strand is represented as formula (Id), each N_{b} independently represents an oligonucleotide sequence comprising 0-10, 0-7, 0-5, 0-4, 0-2, or 0 modified nucleotides. In some embodiments, N_{b} is 0, 1, 2, 3, 4, 5, or 6 Each Nₐ can independently represent an oligonucleotide sequence comprising 2-20, 2-15, or 2-10 modified nucleotides.

[0283] Each of X, Y and Z may be the same or different from each other.

[0284] In other embodiments, i is 0 and j is 0, and the sense strand may be represented by the formula:

5′nₚ-Nₐ—YYY—Nₐ-n_{q}3′ (Ia).

[0285] When the sense strand is represented by formula (Ia), each Nₐ independently can represent an oligonucleotide sequence comprising 2-20, 2-15, or 2-10 modified nucleotides.

[0286] In one embodiment, the antisense strand sequence of the RNAi may be represented by formula (II):

5′n_{q}′—Nₐ′—(Z′Z′Z′)ₖ—N_{b}′—Y′Y′Y′—N_{b}′X′X′X′)ₗ—N′ₐ-nₚ′3′ (II)
[0287] wherein:
[0288] k and l are each independently 0 or 1;
[0289] p′ and q¹ are each independently 0-6;
[0290] each Nₐ′ independently represents an oligonucleotide sequence comprising 0-25 modified nucleotides, each sequence comprising at least two differently modified nucleotides;
[0291] each N_{b}′ independently represents an oligonucleotide sequence comprising 0-10 modified nucleotides;
[0292] each nₚ′ and n_{q}′ independently represent an overhang nucleotide;
[0293] wherein N_{b}′ and Y′ do not have the same modification; and
[0294] X′X′X′, Y′Y′Y′, and Z′Z′Z′ each independently represent one motif of three identical modifications on three consecutive nucleotides.

[0295] In some embodiments, the Nₐ′ or N_{b}′ comprises modifications of alternating pattern.

[0296] The Y′Y′Y′ motif occurs at or near the cleavage site of the antisense strand. For example, when the dsRNAi agent has a duplex region of 17-23 nucleotides in length, the Y′Y′Y′ motif can occur at positions 9, 10, 11; 10, 11, 12; 11, 12, 13; 12, 13, 14; or 13, 14, 15 of the antisense strand, with the count starting from the first nucleotide, from the 5′-end; or optionally, the count starting at the first paired nucleotide within the duplex region, from the 5′-end. In some embodiments, the Y′Y′Y′ motif occurs at positions 11, 12, 13.

[0297] In certain embodiments, Y′Y′Y′ motif is all 2′-OMe modified nucleotides.

[0298] In certain embodiments, k is 1 and l is 0, or k is 0 and l is 1, or both k and l are 1.

[0299] The antisense strand can therefore be represented by the following formulas:

5′n_{q′}-Nₐ′—Z′Z′Z′—N_{b}′—Y′Y′Y′—Nₐ′-n_{p′}3′ (IIb);

5′n_{q′}-Nₐ′—Y′Y′Y′—N_{b}′—X′X′X′-n_{p′}3′ (IIc); or

5′n_{q′}-Nₐ′—Z′Z′Z′—N_{b}′—Y′Y′Y′—N_{b}′—X′X′X′—Nₐ′-n_{p′}3′ (IId).

[0300] When the antisense strand is represented by formula (IIb), N_{b}′ represents an oligonucleotide sequence comprising 0-10, 0-7, 0-10, 0-7, 0-5, 0-4, 0-2, or 0 modified nucleotides. Each Nₐ′ independently represents an oligonucleotide sequence comprising 2-20, 2-15, or 2-10 modified nucleotides.

[0301] When the antisense strand is represented as formula (IIc), N_{b}′ represents an oligonucleotide sequence comprising 0-10, 0-7, 0-10, 0-7, 0-5, 0-4, 0-2, or 0 modified nucleotides. Each Nₐ′ independently represents an oligonucleotide sequence comprising 2-20, 2-15, or 2-10 modified nucleotides.

[0302] When the antisense strand is represented as formula (IId), each N_{b}′ independently represents an oligonucleotide sequence comprising 0-10, 0-7, 0-10, 0-7, 0-5, 0-4, 0-2, or 0 modified nucleotides.

[0303] Each Nₐ′ independently represents an oligonucleotide sequence comprising 2-20, 2-15, or 2-10 modified nucleotides. In some embodiments, N_{b} is 0, 1, 2, 3, 4, 5, or 6.

[0304] In other embodiments, k is 0 and 1 is 0 and the antisense strand may be represented by the formula:

5′n_{p′}-N_{a′}—Y′Y′Y′—N_{a′}-n_{q′}3′ (Ia).

[0305] When the antisense strand is represented as formula (IIa), each Nₐ′ independently represents an oligonucleotide sequence comprising 2-20, 2-15, or 2-10 modified nucleotides.

Each of X′, Y′ and Z′ may be the same or different from each other.

[0306] Each nucleotide of the sense strand and antisense strand may be independently modified with LNA, CRN, UNA, cEt, glycol nucleic acid (GNA), hexitol nucleic acid (HNA), 2′-methoxyethyl, 2′-O-methyl, 2′-O-allyl, 2′-C-allyl, 2′-hydroxyl, or 2′-fluoro. For example, each nucleotide of the sense strand and antisense strand is independently modified with 2′-O-methyl or 2′-fluoro. Each X, Y, Z, X′, Y′, and Z′, in particular, may represent a 2′-O-methyl modification or a 2′-fluoro modification.

[0307] In some embodiments, the sense strand of the dsRNAi agent may contain YYY motif occurring at 9, 10, and 11 positions of the strand when the duplex region is 21 nt, the count starting from the first nucleotide from the 5′-end, or optionally, the count starting at the first paired nucleotide within the duplex region, from the 5′-end; and Y represents 2′-F modification. The sense strand may additionally contain XXX motif or ZZZ motifs as wing modifications at the opposite end of the duplex region; and XXX and ZZZ each independently represents a 2′-OMe modification or 2′-F modification.

[0308] In some embodiments the antisense strand may contain Y′Y′Y′ motif occurring at positions 11, 12, 13 of the strand, the count starting from the first nucleotide from the 5′-end, or optionally, the count starting at the first paired nucleotide within the duplex region, from the 5′-end; and Y′ represents 2′-O-methyl modification. The antisense strand may additionally contain X′X′X′ motif or Z′Z′Z′ motifs as wing modifications at the opposite end of the duplex region; and X′X′X′ and Z′Z′Z′ each independently represents a 2′-OMe modification or 2′-F modification.

[0309] The sense strand represented by any one of the above formulas (Ia), (Ib), (Ic), and (Id) forms a duplex with an antisense strand being represented by any one of formulas (IIa), (IIb), (IIc), and (IId), respectively.

[0310] Accordingly, the dsRNAi agents for use in the methods of the invention may comprise a sense strand and an antisense strand, each strand having 14 to 30 nucleotides, the iRNA duplex represented by formula (III):

sense: 5′nₚ-Nₐ—(XXX)ᵢ—N_{b}—YYY—N_{b}—(ZZZ)ⱼ—Nₐ-n_{q}3′

antisense: 3′nₚ′—Nₐ′—(X′X′X′)ₖ—N_{b}′—Y′Y′Y′—N_{b}′—(Z′Z′Z′)ₗ—Nₐ′-n_{q}′5′ (III)
[0311] wherein:
[0312] i, j, k, and 1 are each independently 0 or 1;
[0313] p, p′, q, and q¹ are each independently 0-6;
[0314] each Nₐ and Nₐ′ independently represents an oligonucleotide sequence comprising 0-25 modified nucleotides, each sequence comprising at least two differently modified nucleotides;
[0315] each N_{b} and N_{b}′ independently represents an oligonucleotide sequence comprising 0-10 modified nucleotides;
[0316] wherein each nₚ′, nₚ, n_{q}′, and n_{q}, each of which may or may not be present, independently represents an overhang nucleotide; and
[0317] XXX, YYY, ZZZ, X′X′X′, Y′Y′Y′, and Z′Z′Z′ each independently represent one motif of three identical modifications on three consecutive nucleotides.

[0318] In one embodiment, i is 0 and j is 0; or i is 1 and j is 0; or i is 0 and j is 1; or both i and j are 0; or both i and j are 1. In another embodiment, k is 0 and 1 is 0; or k is 1 and 1 is 0; k is 0 and 1 is 1; or both k and 1 are 0; or both k and 1 are 1.

[0319] Exemplary combinations of the sense strand and antisense strand forming an iRNA duplex include the formulas below:

5′nₚ-Nₐ—YYY—Nₐ-n_{q}3′

3′nₚ′—Nₐ′—Y′Y′Y′—Nₐ′n_{q}′5′ (IIIa)

5′nₚ-Nₐ—YYY—N_{b}—ZZZ—Nₐ-n_{q}3′

3′nₚ′—Nₐ′—Y′Y′Y′—N_{b}′—Z′Z′Z′—Nₐ′n_{q}′5′ (IIIb)

5′nₚ-Nₐ—XXX—N_{b}—YYY—Nₐ-n_{q}3′

3′nₚ′—Nₐ′—X′X′X′—N_{b}′—Y′Y′Y′—Nₐ′-n_{q}′5′ (IIIc)

5′nₚ-Nₐ—XXX—N_{b}—YYY—N_{b}—ZZZ—Nₐ-n_{q}3′

3′nₚ′—Nₐ′—X′X′X′—N_{b}′—Y′Y′Y′—N_{b}′—Z′Z′Z′—Nₐ-n_{q}′5′ (IIId)

[0320] When the dsRNAi agent is represented by formula (IIIa), each Nₐ independently represents an oligonucleotide sequence comprising 2-20, 2-15, or 2-10 modified nucleotides.

[0321] When the dsRNAi agent is represented by formula (IIIb), each N_{b} independently represents an oligonucleotide sequence comprising 1-10, 1-7, 1-5, or 1-4 modified nucleotides. Each Nₐ independently represents an oligonucleotide sequence comprising 2-20, 2-15, or 2-10 modified nucleotides.

[0322] When the dsRNAi agent is represented as formula (IIIc), each N_{b}, N_{b}′ independently represents an oligonucleotide sequence comprising 0-10, 0-7, 0-10, 0-7, 0-5, 0-4, 0-2, or 0 modified nucleotides. Each Nₐ independently represents an oligonucleotide sequence comprising 2-20, 2-15, or 2-10 modified nucleotides.

[0323] When the dsRNAi agent is represented as formula (IIId), each N_{b}, N_{b}′ independently represents an oligonucleotide sequence comprising 0-10, 0-7, 0-10, 0-7, 0-5, 0-4, 0-2, or 0 modified nucleotides. Each Nₐ, Nₐ′ independently represents an oligonucleotide sequence comprising 2-20, 2-15, or 2-10 modified nucleotides. Each of Nₐ, Nₐ′, N_{b}, and N_{b}′ independently comprises modifications of alternating pattern.

[0324] Each of X, Y, and Z in formulas (III), (IIIa), (IIIb), (IIIc), and (IIId) may be the same or different from each other.

[0325] When the dsRNAi agent is represented by formula (III), (IIIa), (IIIb), (IIIc), and (IIId), at least one of the Y nucleotides may form a base pair with one of the Y′ nucleotides. Alternatively, at least two of the Y nucleotides form base pairs with the corresponding Y′ nucleotides; or all three of the Y nucleotides all form base pairs with the corresponding Y′ nucleotides.

[0326] When the dsRNAi agent is represented by formula (IIIb) or (IIId), at least one of the Z nucleotides may form a base pair with one of the Z′ nucleotides. Alternatively, at least two of the Z nucleotides form base pairs with the corresponding Z′ nucleotides; or all three of the Z nucleotides all form base pairs with the corresponding Z′ nucleotides.

[0327] When the dsRNAi agent is represented as formula (IIIc) or (IIId), at least one of the X nucleotides may form a base pair with one of the X′ nucleotides. Alternatively, at least two of the X nucleotides form base pairs with the corresponding X′ nucleotides; or all three of the X nucleotides all form base pairs with the corresponding X′ nucleotides.

[0328] In certain embodiments, the modification on the Y nucleotide is different than the modification on the Y′ nucleotide, the modification on the Z nucleotide is different than the modification on the Z′ nucleotide, or the modification on the X nucleotide is different than the modification on the X′ nucleotide.

[0329] In certain embodiments, when the dsRNAi agent is represented by formula (IIId), the Nₐ modifications are 2′-O-methyl or 2′-fluoro modifications. In other embodiments, when the RNAi agent is represented by formula (IIId), the Nₐ modifications are 2′-O-methyl or 2′-fluoro modifications and nₚ′>0 and at least one nₚ′ is linked to a neighboring nucleotide a via phosphorothioate linkage. In yet other embodiments, when the RNAi agent is represented by formula (IIId), the Nₐ modifications are 2′-O-methyl or 2′-fluoro modifications, nₚ′>0 and at least one nₚ′ is linked to a neighboring nucleotide via phosphorothioate linkage, and the sense strand is conjugated to one or more GalNAc derivatives attached through a bivalent or trivalent branched linker (described below). In other embodiments, when the RNAi agent is represented by formula (IIId), the Nₐ modifications are 2′-O-methyl or 2′-fluoro modifications, nₚ′>0 and at least one nₚ′ is linked to a neighboring nucleotide via phosphorothioate linkage, the sense strand comprises at least one phosphorothioate linkage, and the sense strand is conjugated to one or more GalNAc derivatives attached through a bivalent or trivalent branched linker.

[0330] In some embodiments, when the dsRNAi agent is represented by formula (IIIa), the Nₐ modifications are 2′-O-methyl or 2′-fluoro modifications, nₚ′>0 and at least one nₚ′ is linked to a neighboring nucleotide via phosphorothioate linkage, the sense strand comprises at least one phosphorothioate linkage, and the sense strand is conjugated to one or more GalNAc derivatives attached through a bivalent or trivalent branched linker.

[0331] In some embodiments, the dsRNAi agent is a multimer containing at least two duplexes represented by formula (III), (IIIa), (IIIb), (IIIc), and (IIId), wherein the duplexes are connected by a linker. The linker can be cleavable or non-cleavable. Optionally, the multimer further comprises a ligand. Each of the duplexes can target the same gene or two different genes; or each of the duplexes can target same gene at two different target sites.

[0332] In some embodiments, the dsRNAi agent is a multimer containing three, four, five, six, or more duplexes represented by formula (III), (IIIa), (IIIb), (IIIc), and (IIId), wherein the duplexes are connected by a linker. The linker can be cleavable or non-cleavable. Optionally, the multimer further comprises a ligand. Each of the duplexes can target the same gene or two different genes; or each of the duplexes can target same gene at two different target sites.

[0333] In one embodiment, two dsRNAi agents represented by at least one of formulas (III), (IIIa), (IIIb), (IIIc), and (IIId) are linked to each other at the 5′ end, and one or both of the 3′ ends, and are optionally conjugated to a ligand. Each of the agents can target the same gene or two different genes; or each of the agents can target same gene at two different target sites.

[0334] In certain embodiments, an RNAi agent of the invention may contain a low number of nucleotides containing a 2′-fluoro modification, e.g., 10 or fewer nucleotides with 2′-fluoro modification. For example, the RNAi agent may contain 10, 9, 8, 7, 6, 5, 4, 3, 2, 1 or 0 nucleotides with a 2′-fluoro modification. In a specific embodiment, the RNAi agent of the invention contains 10 nucleotides with a 2′-fluoro modification, e.g., 4 nucleotides with a 2′-fluoro modification in the sense strand and 6 nucleotides with a 2′-fluoro modification in the antisense strand. In another specific embodiment, the RNAi agent of the invention contains 6 nucleotides with a 2′-fluoro modification, e.g., 4 nucleotides with a 2′-fluoro modification in the sense strand and 2 nucleotides with a 2′-fluoro modification in the antisense strand.

[0335] In other embodiments, an RNAi agent of the invention may contain an ultra low number of nucleotides containing a 2′-fluoro modification, e.g., 2 or fewer nucleotides containing a 2′-fluoro modification. For example, the RNAi agent may contain 2, 1 of 0 nucleotides with a 2′-fluoro modification. In a specific embodiment, the RNAi agent may contain 2 nucleotides with a 2′-fluoro modification, e.g., 0 nucleotides with a 2-fluoro modification in the sense strand and 2 nucleotides with a 2′-fluoro modification in the antisense strand.

[0336] Various publications describe multimeric iRNAs that can be used in the methods of the invention. Such publications include WO2007/091269, U.S. Pat. No. 7,858,769, WO2010/141511, WO2007/117686, WO2009/014887, and WO2011/031520 the entire contents of each of which are hereby incorporated herein by reference.

[0337] In certain embodiments, the compositions and methods of the disclosure include a vinyl phosphonate (VP) modification of an RNAi agent as described herein. In exemplary embodiments, a 5′-vinyl phosphonate modified nucleotide of the disclosure has the structure:

[chemical structure]

wherein X is O or S;
[0338] R is hydrogen, hydroxy, fluoro, or C₁₋₂₀alkoxy (e.g., methoxy or n-hexadecyloxy);
[0339] R^{5′} is ═C(H)—P(O)(OH)₂ and the double bond between the C5′ carbon and R^{5′} is in the E or Z orientation (e.g., E orientation); and
[0340] B is a nucleobase or a modified nucleobase, optionally where B is adenine, guanine, cytosine, thymine, or uracil.

[0341] A vinyl phosphonate of the instant disclosure may be attached to either the antisense or the sense strand of a dsRNA of the disclosure. In certain embodiments, a vinyl phosphonate of the instant disclosure is attached to the antisense strand of a dsRNA, optionally at the 5′ end of the antisense strand of the dsRNA.

[0342] Vinyl phosphate modifications are also contemplated for the compositions and methods of the instant disclosure. An exemplary vinyl phosphate structure includes the preceding structure, where R5′ is ═C(H)—OP(O)(OH)₂ and the double bond between the C5′ carbon and R5′ is in the E or Z orientation (e.g., E orientation).

[0343] As described in more detail below, the iRNA that contains conjugations of one or more carbohydrate moieties to an iRNA can optimize one or more properties of the iRNA. In many cases, the carbohydrate moiety will be attached to a modified subunit of the iRNA. For example, the ribose sugar of one or more ribonucleotide subunits of a iRNA can be replaced with another moiety, e.g., a non-carbohydrate (e.g., cyclic) carrier to which is attached a carbohydrate ligand. A ribonucleotide subunit in which the ribose sugar of the subunit has been so replaced is referred to herein as a ribose replacement modification subunit (RRMS). A cyclic carrier may be a carbocyclic ring system, i.e., all ring atoms are carbon atoms, or a heterocyclic ring system, i.e., one or more ring atoms may be a heteroatom, e.g., nitrogen, oxygen, sulfur. The cyclic carrier may be a monocyclic ring system, or may contain two or more rings, e.g. fused rings. The cyclic carrier may be a fully saturated ring system, or it may contain one or more double bonds.

[0344] The ligand may be attached to the polynucleotide via a carrier. The carriers include (i) at least one “backbone attachment point,” sich as two “backbone attachment points” and (ii) at least one “tethering attachment point.” A “backbone attachment point” as used herein refers to a functional group, e.g. a hydroxyl group, or generally, a bond available for, and that is suitable for incorporation of the carrier into the backbone, e.g., the phosphate, or modified phosphate, e.g., sulfur containing, backbone, of a ribonucleic acid. A “tethering attachment point” (TAP) in some embodiments refers to a constituent ring atom of the cyclic carrier, e.g., a carbon atom or a heteroatom (distinct from an atom which provides a backbone attachment point), that connects a selected moiety. The moiety can be, e.g., a carbohydrate, e.g. monosaccharide, disaccharide, trisaccharide, tetrasaccharide, oligosaccharide, or polysaccharide. Optionally, the selected moiety is connected by an intervening tether to the cyclic carrier. Thus, the cyclic carrier will often include a functional group, e.g., an amino group, or generally, provide a bond, that is suitable for incorporation or tethering of another chemical entity, e.g., a ligand to the constituent ring.

[0345] The iRNA may be conjugated to a ligand via a carrier, wherein the carrier can be cyclic group or acyclic group; in some embodiments, the cyclic group is selected from pyrrolidinyl, pyrazolinyl, pyrazolidinyl, imidazolinyl, imidazolidinyl, piperidinyl, piperazinyl, [1,3]dioxolane, oxazolidinyl, isoxazolidinyl, morpholinyl, thiazolidinyl, isothiazolidinyl, quinoxalinyl, pyridazinonyl, tetrahydrofuryl, and decalin; in some embodiments, the acyclic group is a serinol backbone or diethanolamine backbone.

[0346] i. Thermally Destabilizing Modifications

[0347] In certain embodiments, a dsRNA molecule can be optimized for RNA interference by incorporating thermally destabilizing modifications in the seed region of the antisense strand. As used herein “seed region” means at positions 2-9 of the 5′-end of the referenced strand. For example, thermally destabilizing modifications can be incorporated in the seed region of the antisense strand to reduce or inhibit off-target gene silencing.

[0348] The term “thermally destabilizing modification(s)” includes modification(s) that would result with a dsRNA with a lower overall melting temperature (Tm) than the Tm of the dsRNA without having such modification(s). For example, the thermally destabilizing modification(s) can decrease the Tm of the dsRNA by 1-4° C., such as one, two, three or four degrees Celcius. And, the term “thermally destabilizing nucleotide” refers to a nucleotide containing one or more thermally destabilizing modifications.

[0349] It has been discovered that dsRNAs with an antisense strand comprising at least one thermally destabilizing modification of the duplex within the first 9 nucleotide positions, counting from the 5′ end, of the antisense strand have reduced off-target gene silencing activity. Accordingly, in some embodiments, the antisense strand comprises at least one (e.g., one, two, three, four, five or more) thermally destabilizing modification of the duplex within the first 9 nucleotide positions of the 5′ region of the antisense strand. In some embodiments, one or more thermally destabilizing modification(s) of the duplex is/are located in positions 2-9, or in some embodiments positions 4-8, from the 5′-end of the antisense strand. In some further embodiments, the thermally destabilizing modification(s) of the duplex is/are located at position 6, 7 or 8 from the 5′-end of the antisense strand. In still some further embodiments, the thermally destabilizing modification of the duplex is located at position 7 from the 5′-end of the antisense strand. In some embodiments, the thermally destabilizing modification of the duplex is located at position 2, 3, 4, 5 or 9 from the 5′-end of the antisense strand.

[0350] An iRNA agent comprises a sense strand and an antisense strand, each strand having 14 to 40 nucleotides. The RNAi agent may be represented by formula (L):

[chemical structure]

In formula (L), B1, B2, B3, B1′, B2′, B3′, and B4′ each are independently a nucleotide containing a modification selected from the group consisting of 2′-O-alkyl, 2′-substituted alkoxy, 2′-substituted alkyl, 2′-halo, ENA, and BNA/LNA. In one embodiment, B1, B2, B3, B1′, B2′, B3′, and B4′ each contain 2′-OMe modifications. In one embodiment, B1, B2, B3, B1′, B2′, B3′, and B4′ each contain 2′-OMe or 2′-F modifications. In one embodiment, at least one of B1, B2, B3, B1′, B2′, B3′, and B4′ contain 2′-O—N-methylacetamido (2′-O-NMA) modification.

[0351] C1 is a thermally destabilizing nucleotide placed at a site opposite to the seed region of the antisense strand (i.e., at positions 2-8 of the 5′-end of the antisense strand). For example, C1 is at a position of the sense strand that pairs with a nucleotide at positions 2-8 of the 5′-end of the antisense strand. In one example, C1 is at position 15 from the 5′-end of the sense strand. C1 nucleotide bears the thermally destabilizing modification which can include abasic modification; mismatch with the opposing nucleotide in the duplex; and sugar modification such as 2′-deoxy modification or acyclic nucleotide e.g., unlocked nucleic acids (UNA) or glycerol nucleic acid (GNA). In one embodiment, Cl has thermally destabilizing modification selected from the group consisting of: i) mismatch with the opposing nucleotide in the antisense strand; ii) abasic modification selected from the group consisting of:

[chemical structure]

and iii) sugar modification selected from the group consisting of:

[chemical structure]

wherein B is a modified or unmodified nucleobase, R¹ and R² independently are H, halogen, OR₃, or alkyl; and R₃ is H, alkyl, cycloalkyl, aryl, aralkyl, heteroaryl or sugar. In one embodiment, the thermally destabilizing modification in C1 is a mismatch selected from the group consisting of G:G, G:A, G:U, G:T, A:A, A:C, C:C, C:U, C:T, U:U, T:T, and U:T; and optionally, at least one nucleobase in the mismatch pair is a 2-deoxy nucleobase. In one example, the thermally destabilizing modification in C1 is GNA or

[chemical structure]

T1, T1′, T2′, and T3′ each independently represent a nucleotide comprising a modification providing the nucleotide a steric bulk that is less or equal to the steric bulk of a 2′-OMe modification. A steric bulk refers to the sum of steric effects of a modification. Methods for determining steric effects of a modification of a nucleotide are known to one skilled in the art. The modification can be at the 2′ position of a ribose sugar of the nucleotide, or a modification to a non-ribose nucleotide, acyclic nucleotide, or the backbone of the nucleotide that is similar or equivalent to the 2′ position of the ribose sugar, and provides the nucleotide a steric bulk that is less than or equal to the steric bulk of a 2′-OMe modification. For example, T1, T1′, T2′, and T3′ are each independently selected from DNA, RNA, LNA, 2′-F, and 2′-F-5′-methyl. In one embodiment, T1 is DNA. In one embodiment, T1′ is DNA, RNA or LNA. In one embodiment, T2′ is DNA or RNA. In one embodiment, T3′ is DNA or RNA.
[0352] n¹, n³, and q¹ are independently 4 to 15 nucleotides in length.
[0353] n⁵, q³, and q⁷ are independently 1-6 nucleotide(s) in length.
[0354] n⁴, q², and q⁶ are independently 1-3 nucleotide(s) in length; alternatively, n⁴ is 0.
[0355] q⁵ is independently 0-10 nucleotide(s) in length.
[0356] n² and q⁴ are independently 0-3 nucleotide(s) in length.

[0357] Alternatively, n⁴ is 0-3 nucleotide(s) in length.

[0358] In one embodiment, n⁴ can be 0. In one example, n⁴ is 0, and q² and q⁶ are 1. In another example, n⁴ is 0, and q² and q⁶ are 1, with two phosphorothioate internucleotide linkage modifications within position 1-5 of the sense strand (counting from the 5′-end of the sense strand), and two phosphorothioate internucleotide linkage modifications at positions 1 and 2 and two phosphorothioate internucleotide linkage modifications within positions 18-23 of the antisense strand (counting from the 5′-end of the antisense strand).

[0359] In one embodiment, n⁴, q², and q⁶ are each 1.

[0360] In one embodiment, n², n⁴, q², q⁴, and q⁶ are each 1.

[0361] In one embodiment, C1 is at position 14-17 of the 5′-end of the sense strand, when the sense strand is 19-22 nucleotides in length, and n⁴ is 1. In one embodiment, C1 is at position 15 of the 5′-end of the sense strand

[0362] In one embodiment, T3′ starts at position 2 from the 5′ end of the antisense strand. In one example, T3′ is at position 2 from the 5′ end of the antisense strand and q⁶ is equal to 1.

[0363] In one embodiment, T1′ starts at position 14 from the 5′ end of the antisense strand. In one example, T1′ is at position 14 from the 5′ end of the antisense strand and q² is equal to 1.

[0364] In an exemplary embodiment, T3′ starts from position 2 from the 5′ end of the antisense strand and T1′ starts from position 14 from the 5′ end of the antisense strand. In one example, T3′ starts from position 2 from the 5′ end of the antisense strand and q⁶ is equal to 1 and T1′ starts from position 14 from the 5′ end of the antisense strand and q² is equal to 1.

[0365] In one embodiment, T1′ and T3′ are separated by 11 nucleotides in length (i.e. not counting the T1′ and T3′ nucleotides).

[0366] In one embodiment, T1′ is at position 14 from the 5′ end of the antisense strand. In one example, T1′ is at position 14 from the 5′ end of the antisense strand and q² is equal to 1, and the modification at the 2′ position or positions in a non-ribose, acyclic or backbone that provide less steric bulk than a 2′-OMe ribose.

[0367] In one embodiment, T3′ is at position 2 from the 5′ end of the antisense strand. In one example, T3′ is at position 2 from the 5′ end of the antisense strand and q⁶ is equal to 1, and the modification at the 2′ position or positions in a non-ribose, acyclic or backbone that provide less than or equal to steric bulk than a 2′-OMe ribose.

[0368] In one embodiment, T1 is at the cleavage site of the sense strand. In one example, T1 is at position 11 from the 5′ end of the sense strand, when the sense strand is 19-22 nucleotides in length, and n² is 1. In an exemplary embodiment, T1 is at the cleavage site of the sense strand at position 11 from the 5′ end of the sense strand, when the sense strand is 19-22 nucleotides in length, and n² is 1, In one embodiment, T2′ starts at position 6 from the 5′ end of the antisense strand. In one example, T2′ is at positions 6-10 from the 5′ end of the antisense strand, and q⁴ is 1.

[0369] In an exemplary embodiment, T1 is at the cleavage site of the sense strand, for instance, at position 11 from the 5′ end of the sense strand, when the sense strand is 19-22 nucleotides in length, and n² is 1; T1′ is at position 14 from the 5′ end of the antisense strand, and q² is equal to 1, and the modification to T1′ is at the 2′ position of a ribose sugar or at positions in a non-ribose, acyclic or backbone that provide less steric bulk than a 2′-OMe ribose; T2′ is at positions 6-10 from the 5′ end of the antisense strand, and q⁴ is 1; and T3′ is at position 2 from the 5′ end of the antisense strand, and q⁶ is equal to 1, and the modification to T3′ is at the 2′ position or at positions in a non-ribose, acyclic or backbone that provide less than or equal to steric bulk than a 2′-OMe ribose. In one embodiment, T2′ starts at position 8 from the 5′ end of the antisense strand. In one example, T2′ starts at position 8 from the 5′ end of the antisense strand, and q⁴ is 2.

[0370] In one embodiment, T2′ starts at position 9 from the 5′ end of the antisense strand. In one example, T2′ is at position 9 from the 5′ end of the antisense strand, and q⁴ is 1.

[0371] In one embodiment, B1′ is 2′-OMe or 2′-F, q¹ is 9, T1′ is 2′-F, q² is 1, B2′ is 2′-OMe or 2′-F, q³ is 4, T2′ is 2′-F, q⁴ is 1, B3′ is 2′-OMe or 2′-F, q⁵ is 6, T3′ is 2′-F, q⁶ is 1, B4′ is 2′-OMe, and q⁷ is 1; with two phosphorothioate internucleotide linkage modifications within positions 1-5 of the sense strand (counting from the 5′-end of the sense strand), and two phosphorothioate internucleotide linkage modifications at positions 1 and 2 and two phosphorothioate internucleotide linkage modifications within positions 18-23 of the antisense strand (counting from the 5′-end of the antisense strand).

[0372] In one embodiment, n⁴ is 0, B3 is 2′-OMe, n⁵ is 3, B1′ is 2′-OMe or 2′-F, q¹ is 9, T1′ is 2′-F, q² is 1, B2′ is 2′-OMe or 2′-F, q³ is 4, T2′ is 2′-F, q⁴ is 1, B3′ is 2′-OMe or 2′-F, q⁵ is 6, T3′ is 2′-F, q⁶ is 1, B4′ is 2′-OMe, and q⁷ is 1; with two phosphorothioate internucleotide linkage modifications within positions 1-5 of the sense strand (counting from the 5′-end of the sense strand), and two phosphorothioate internucleotide linkage modifications at positions 1 and 2 and two phosphorothioate internucleotide linkage modifications within positions 18-23 of the antisense strand (counting from the 5′-end of the antisense strand).

[0373] In one embodiment, B1 is 2′-OMe or 2′-F, n¹ is 8, T1 is 2′F, n² is 3, B2 is 2′-OMe, n³ is 7, n⁴ is 0, B3 is 2′OMe, n⁵ is 3, B1′ is 2′-OMe or 2′-F, q¹ is 9, T1′ is 2′-F, q² is 1, B2′ is 2′-OMe or 2′-F, q³ is 4, T2′ is 2′-F, q⁴ is 2, B3′ is 2′-OMe or 2′-F, q⁵ is 5, T3′ is 2′-F, q⁶ is 1, B4′ is 2′-OMe, and q⁷ is 1.

In one embodiment, B1 is 2′-OMe or 2′-F, n¹ is 8, T1 is 2′F, n² is 3, B2 is 2′-OMe, n³ is 7, n⁴ is 0, B3 is 2′-OMe, n⁵ is 3, B1′ is 2′-OMe or 2′-F, q¹ is 9, T1′ is 2′-F, q² is 1, B2′ is 2′-OMe or 2′-F, q³ is 4, T2′ is 2′-F, q⁴ is 2, B3′ is 2′-OMe or 2′-F, q⁵ is 5, T3′ is 2′-F, q⁶ is 1, B4′ is 2′-OMe, and q⁷ is 1; with two phosphorothioate internucleotide linkage modifications within positions 1-5 of the sense strand (counting from the 5′-end of the sense strand), and two phosphorothioate internucleotide linkage modifications at positions 1 and 2 and two phosphorothioate internucleotide linkage modifications within positions 18-23 of the antisense strand (counting from the 5′-end of the antisense strand).

[0374] In one embodiment, B1 is 2′-OMe or 2′-F, n¹ is 6, T1 is 2′F, n² is 3, B2 is 2′-OMe, n³ is 7, n⁴ is 0, B3 is 2′OMe, n⁵ is 3, B1′ is 2′-OMe or 2′-F, q¹ is 7, T1′ is 2′-F, q² is 1, B2′ is 2′-OMe or 2′-F, q³ is 4, T2′ is 2′-F, q⁴ is 2, B3′ is 2′-OMe or 2′-F, q⁵ is 5, T3′ is 2′-F, q⁶ is 1, B4′ is 2′-OMe, and q⁷ is 1.

In one embodiment, B1 is 2′-OMe or 2′-F, n¹ is 6, T1 is 2′F, n² is 3, B2 is 2′-OMe, n³ is 7, n⁴ is 0, B3 is 2′-OMe, n⁵ is 3, B1′ is 2′-OMe or 2′-F, q¹ is 7, T1′ is 2′-F, q² is 1, B2′ is 2′-OMe or 2′-F, q³ is 4, T2′ is 2′-F, q⁴ is 2, B3′ is 2′-OMe or 2′-F, q⁵ is 5, T3′ is 2′-F, q⁶ is 1, B4′ is 2′-OMe, and q⁷ is 1; with two phosphorothioate internucleotide linkage modifications within positions 1-5 of the sense strand (counting from the 5′-end of the sense strand), and two phosphorothioate internucleotide linkage modifications at positions 1 and 2 and two phosphorothioate internucleotide linkage modifications within positions 18-23 of the antisense strand (counting from the 5′-end of the antisense strand).

[0375] In one embodiment, B1 is 2′-OMe or 2′-F, n¹ is 8, T1 is 2′F, n² is 3, B2 is 2′-OMe, n³ is 7, n⁴ is 0, B3 is 2′OMe, n⁵ is 3, B1′ is 2′-OMe or 2′-F, q¹ is 9, T1′ is 2′-F, q² is 1, B2′ is 2′-OMe or 2′-F, q³ is 4, T2′ is 2′-F, q⁴ is 1, B3′ is 2′-OMe or 2′-F, q⁵ is 6, T3′ is 2′-F, q⁶ is 1, B4′ is 2′-OMe, and q⁷ is 1.

In one embodiment, B1 is 2′-OMe or 2′-F, n¹ is 8, T1 is 2′F, n² is 3, B2 is 2′-OMe, n³ is 7, n⁴ is 0, B3 is 2′-OMe, n⁵ is 3, B1′ is 2′-OMe or 2′-F, q¹ is 9, T1′ is 2′-F, q² is 1, B2′ is 2′-OMe or 2′-F, q³ is 4, T2′ is 2′-F, q⁴ is 1, B3′ is 2′-OMe or 2′-F, q⁵ is 6, T3′ is 2′-F, q⁶ is 1, B4′ is 2′-OMe, and q⁷ is 1; with two phosphorothioate internucleotide linkage modifications within positions 1-5 of the sense strand (counting from the 5′-end of the sense strand), and two phosphorothioate internucleotide linkage modifications at positions 1 and 2 and two phosphorothioate internucleotide linkage modifications within positions 18-23 of the antisense strand (counting from the 5′-end of the antisense strand).

[0376] In one embodiment, B1 is 2′-OMe or 2′-F, n¹ is 8, T1 is 2′F, n² is 3, B2 is 2′-OMe, n³ is 7, n⁴ is 0, B3 is 2′OMe, n⁵ is 3, B1′ is 2′-OMe or 2′-F, q¹ is 9, T1′ is 2′-F, q² is 1, B2′ is 2′-OMe or 2′-F, q³ is 5, T2′ is 2′-F, q⁴ is 1, B3′ is 2′-OMe or 2′-F, q⁵ is 5, T3′ is 2′-F, q⁶ is 1, B4′ is 2′-OMe, and q⁷ is 1; optionally with at least 2 additional TT at the 3′-end of the antisense strand.

In one embodiment, B1 is 2′-OMe or 2′-F, n¹ is 8, T1 is 2′F, n² is 3, B2 is 2′-OMe, n³ is 7, n⁴ is 0, B3 is 2′-OMe, n⁵ is 3, B1′ is 2′-OMe or 2′-F, q¹ is 9, T1′ is 2′-F, q² is 1, B2′ is 2′-OMe or 2′-F, q³ is 5, T2′ is 2′-F, q⁴ is 1, B3′ is 2′-OMe or 2′-F, q⁵ is 5, T3′ is 2′-F, q⁶ is 1, B4′ is 2′-OMe, and q⁷ is 1; optionally with at least 2 additional TT at the 3′-end of the antisense strand; with two phosphorothioate internucleotide linkage modifications within positions 1-5 of the sense strand (counting from the 5′-end of the sense strand), and two phosphorothioate internucleotide linkage modifications at positions 1 and 2 and two phosphorothioate internucleotide linkage modifications within positions 18-23 of the antisense strand (counting from the 5′-end of the antisense strand).

[0377] In one embodiment, B1 is 2′-OMe or 2′-F, n¹ is 8, T1 is 2′F, n² is 3, B2 is 2′-OMe, n³ is 7, n⁴ is 0, B3 is 2′-OMe, n⁵ is 3, B1′ is 2′-OMe or 2′-F, q¹ is 9, T1′ is 2′-F, q² is 1, B2′ is 2′-OMe or 2′-F, q³ is 4, q4 is 0, B3′ is 2′-OMe or 2′-F, q⁵ is 7, T3′ is 2′-F, q⁶ is 1, B4′ is 2′-OMe, and q⁷ is 1. In one embodiment, B1 is 2′-OMe or 2′-F, n¹ is 8, T1 is 2′F, n² is 3, B2 is 2′-OMe, n³ is 7, n⁴ is 0, B3 is 2′-OMe, n⁵ is 3, B1′ is 2′-OMe or 2′-F, q¹ is 9, T1′ is 2′-F, q² is 1, B2′ is 2′-OMe or 2′-F, q³ is 4, q⁴ is 0, B3′ is 2′-OMe or 2′-F, q⁵ is 7, T3′ is 2′-F, q⁶ is 1, B4′ is 2′-OMe, and q⁷ is 1; with two phosphorothioate internucleotide linkage modifications within positions 1-5 of the sense strand (counting from the 5′-end), and two phosphorothioate internucleotide linkage modifications at positions 1 and 2 and two phosphorothioate internucleotide linkage modifications within positions 18-23 of the antisense strand (counting from the 5′-end).

[0378] In one embodiment, B1 is 2′-OMe or 2′-F, n¹ is 8, T1 is 2′F, n² is 3, B2 is 2′-OMe, n³ is 7, n⁴ is 0, B3 is 2′OMe, n⁵ is 3, B1′ is 2′-OMe or 2′-F, q¹ is 9, T1′ is 2′-F, q² is 1, B2′ is 2′-OMe or 2′-F, q³ is 4, T2′ is 2′-F, q⁴ is 2, B3′ is 2′-OMe or 2′-F, q⁵ is 5, T3′ is 2′-F, q⁶ is 1, B4′ is 2′-F, and q⁷ is 1. In one embodiment, B1 is 2′-OMe or 2′-F, n¹ is 8, T1 is 2′F, n² is 3, B2 is 2′-OMe, n³ is 7, n⁴ is 0, B3 is 2′-OMe, n⁵ is 3, B1′ is 2′-OMe or 2′-F, q¹ is 9, T1′ is 2′-F, q² is 1, B2′ is 2′-OMe or 2′-F, q³ is 4, T2′ is 2′-F, q⁴ is 2, B3′ is 2′-OMe or 2′-F, q⁵ is 5, T3′ is 2′-F, q⁶ is 1, B4′ is 2′-F, and q⁷ is 1; with two phosphorothioate internucleotide linkage modifications within positions 1-5 of the sense strand (counting from the 5′-end of the sense strand), and two phosphorothioate internucleotide linkage modifications at positions 1 and 2 and two phosphorothioate internucleotide linkage modifications within positions 18-23 of the antisense strand (counting from the 5′-end of the antisense strand).

[0379] In one embodiment, B1 is 2′-OMe or 2′-F, n¹ is 8, T1 is 2′F, n² is 3, B2 is 2′-OMe, n³ is 7, n⁴ is 0, B3 is 2′-OMe, n⁵ is 3, B1′ is 2′-OMe or 2′-F, q¹ is 9, T1′ is 2′-F, q² is 1, B2′ is 2′-OMe or 2′-F, q³ is 4, q4 is 0, B3′ is 2′-OMe or 2′-F, q⁵ is 7, T3′ is 2′-F, q⁶ is 1, B4′ is 2′-F, and q⁷ is 1. In one embodiment, B1 is 2′-OMe or 2′-F, n¹ is 8, T1 is 2′F, n² is 3, B2 is 2′-OMe, n³ is 7, n⁴ is 0, B3 is 2′-OMe, n⁵ is 3, B1′ is 2′-OMe or 2′-F, q¹ is 9, T1′ is 2′-F, q² is 1, B2′ is 2′-OMe or 2′-F, q³ is 4, q⁴ is 0, B3′ is 2′-OMe or 2′-F, q⁵ is 7, T3′ is 2′-F, q⁶ is 1, B4′ is 2′-F, and q⁷ is 1; with two phosphorothioate internucleotide linkage modifications within positions 1-5 of the sense strand (counting from the 5′-end of the sense strand), and two phosphorothioate internucleotide linkage modifications at positions 1 and 2 and two phosphorothioate internucleotide linkage modifications within positions 18-23 of the antisense strand (counting from the 5′-end of the antisense strand).

[0380] The RNAi agent can comprise a phosphorus-containing group at the 5′-end of the sense strand or antisense strand. The 5′-end phosphorus-containing group can be 5′-end phosphate (5′-P), 5′-end phosphorothioate (5′-PS), 5′-end phosphorodithioate (5′-PS₂), 5′-end vinylphosphonate (5′-VP), 5′-end methylphosphonate (MePhos), or 5′-deoxy-5′-C-malonyl

[chemical structure]

When the 5′-end phosphorus-containing group is 5′-end vinylphosphonate (5′-VP), the 5′-VP can be either 5′-E-VP isomer (i.e., trans-vinylphosphate,

[chemical structure]

5′-Z—VP isomer (i.e., cis-vinylphosphate,

[chemical structure]

or mixtures thereof.
In one embodiment, the RNAi agent comprises a phosphorus-containing group at the 5′-end of the sense strand. In one embodiment, the RNAi agent comprises a phosphorus-containing group at the 5′-end of the antisense strand.

[0381] In one embodiment, the RNAi agent comprises a 5′-P. In one embodiment, the RNAi agent comprises a 5′-P in the antisense strand.

[0382] In one embodiment, the RNAi agent comprises a 5′-PS. In one embodiment, the RNAi agent comprises a 5′-PS in the antisense strand.

[0383] In one embodiment, the RNAi agent comprises a 5′-VP. In one embodiment, the RNAi agent comprises a 5′-VP in the antisense strand. In one embodiment, the RNAi agent comprises a 5′-E-VP in the antisense strand. In one embodiment, the RNAi agent comprises a 5′-Z—VP in the antisense strand.

[0384] In one embodiment, the RNAi agent comprises a 5′-PS₂. In one embodiment, the RNAi agent comprises a 5′-PS₂ in the antisense strand.

[0385] In one embodiment, the RNAi agent comprises a 5′-PS₂. In one embodiment, the RNAi agent comprises a 5′-deoxy-5′-C-malonyl in the antisense strand.

In one embodiment, B1 is 2′-OMe or 2′-F, n¹ is 8, T1 is 2′F, n² is 3, B2 is 2′-OMe, n³ is 7, n⁴ is 0, B3 is 2′OMe, n⁵ is 3, B1′ is 2′-OMe or 2′-F, q¹ is 9, T1′ is 2′-F, q² is 1, B2′ is 2′-OMe or 2′-F, q³ is 4, T2′ is 2′-F, q⁴ is 2, B3′ is 2′-OMe or 2′-F, q⁵ is 5, T3′ is 2′-F, q⁶ is 1, B4′ is 2′-OMe, and q⁷ is 1. The RNAi agent also comprises a 5′-PS.

[0386] In one embodiment, B1 is 2′-OMe or 2′-F, n¹ is 8, T1 is 2′F, n² is 3, B2 is 2′-OMe, n³ is 7, n⁴ is 0, B3 is 2′OMe, n¹ is 3, B1′ is 2′-OMe or 2′-F, q¹ is 9, T1′ is 2′-F, q² is 1, B2′ is 2′-OMe or 2′-F, q³ is 4, T2′ is 2′-F, q⁴ is 2, B3′ is 2′-OMe or 2′-F, q⁵ is 5, T3′ is 2′-F, q⁶ is 1, B4′ is 2′-OMe, and q⁷ is 1. The RNAi agent also comprises a 5′-P.

[0387] In one embodiment, B1 is 2′-OMe or 2′-F, n¹ is 8, T1 is 2′F, n² is 3, B2 is 2′-OMe, n³ is 7, n⁴ is 0, B3 is 2′OMe, n⁵ is 3, B1′ is 2′-OMe or 2′-F, q¹ is 9, T1′ is 2′-F, q² is 1, B2′ is 2′-OMe or 2′-F, q³ is 4, T2′ is 2′-F, q⁴ is 2, B3′ is 2′-OMe or 2′-F, q⁵ is 5, T3′ is 2′-F, q⁶ is 1, B4′ is 2′-OMe, and q⁷ is 1. The RNAi agent also comprises a 5′-VP. The 5′-VP may be 5′-E-VP, 5′-Z—VP, or combination thereof.

[0388] In one embodiment, B1 is 2′-OMe or 2′-F, n¹ is 8, T1 is 2′F, n² is 3, B2 is 2′-OMe, n³ is 7, n⁴ is 0, B3 is 2′OMe, n⁵ is 3, B1′ is 2′-OMe or 2′-F, q¹ is 9, T1′ is 2′-F, q² is 1, B2′ is 2′-OMe or 2′-F, q³ is 4, T2′ is 2′-F, q⁴ is 2, B3′ is 2′-OMe or 2′-F, q⁵ is 5, T3′ is 2′-F, q⁶ is 1, B4′ is 2′-OMe, and q⁷ is 1. The RNAi agent also comprises a 5′-PS₂.

[0389] In one embodiment, B1 is 2′-OMe or 2′-F, n¹ is 8, T1 is 2′F, n² is 3, B2 is 2′-OMe, n³ is 7, n⁴ is 0, B3 is 2′OMe, n⁵ is 3, B1′ is 2′-OMe or 2′-F, q¹ is 9, T1′ is 2′-F, q² is 1, B2′ is 2′-OMe or 2′-F, q³ is 4, T2′ is 2′-F, q⁴ is 2, B3′ is 2′-OMe or 2′-F, q⁵ is 5, T3′ is 2′-F, q⁶ is 1, B4′ is 2′-OMe, and q⁷ is 1. The RNAi agent also comprises a 5′-deoxy-5′-C-malonyl.

[0390] In one embodiment, B1 is 2′-OMe or 2′-F, n¹ is 8, T1 is 2′F, n² is 3, B2 is 2′-OMe, n³ is 7, n⁴ is 0, B3 is 2′-OMe, n⁵ is 3, B1′ is 2′-OMe or 2′-F, q¹ is 9, T1′ is 2′-F, q² is 1, B2′ is 2′-OMe or 2′-F, q³ is 4, T2′ is 2′-F, q⁴ is 2, B3′ is 2′-OMe or 2′-F, q⁵ is 5, T3′ is 2′-F, q⁶ is 1, B4′ is 2′-OMe, and q⁷ is 1; with two phosphorothioate internucleotide linkage modifications within position 1-5 of the sense strand (counting from the 5′-end of the sense strand), and two phosphorothioate internucleotide linkage modifications at positions 1 and 2 and two phosphorothioate internucleotide linkage modifications within positions 18-23 of the antisense strand (counting from the 5′-end of the antisense strand). The RNAi agent also comprises a 5′-P.

[0391] In one embodiment, B1 is 2′-OMe or 2′-F, n¹ is 8, T1 is 2′F, n² is 3, B2 is 2′-OMe, n³ is 7, n⁴ is 0, B3 is 2′-OMe, n⁵ is 3, B1′ is 2′-OMe or 2′-F, q¹ is 9, T1′ is 2′-F, q² is 1, B2′ is 2′-OMe or 2′-F, q³ is 4, T2′ is 2′-F, q⁴ is 2, B3′ is 2′-OMe or 2′-F, q⁵ is 5, T3′ is 2′-F, q⁶ is 1, B4′ is 2′-OMe, and q⁷ is 1; with two phosphorothioate internucleotide linkage modifications within position 1-5 of the sense strand (counting from the 5′-end of the sense strand), and two phosphorothioate internucleotide linkage modifications at positions 1 and 2 and two phosphorothioate internucleotide linkage modifications within positions 18-23 of the antisense strand (counting from the 5′-end of the antisense strand). The RNAi agent also comprises a 5′-PS.

[0392] In one embodiment, B1 is 2′-OMe or 2′-F, n¹ is 8, T1 is 2′F, n² is 3, B2 is 2′-OMe, n³ is 7, n⁴ is 0, B3 is 2′-OMe, n⁵ is 3, B1′ is 2′-OMe or 2′-F, q¹ is 9, T1′ is 2′-F, q² is 1, B2′ is 2′-OMe or 2′-F, q³ is 4, T2′ is 2′-F, q⁴ is 2, B3′ is 2′-OMe or 2′-F, q⁵ is 5, T3′ is 2′-F, q⁶ is 1, B4′ is 2′-OMe, and q⁷ is 1; with two phosphorothioate internucleotide linkage modifications within position 1-5 of the sense strand (counting from the 5′-end of the sense strand), and two phosphorothioate internucleotide linkage modifications at positions 1 and 2 and two phosphorothioate internucleotide linkage modifications within positions 18-23 of the antisense strand (counting from the 5′-end of the antisense strand). The RNAi agent also comprises a 5′-VP. The 5′-VP may be 5′-E-VP, 5′-Z—VP, or combination thereof.

In one embodiment, B1 is 2′-OMe or 2′-F, n¹ is 8, T1 is 2′F, n² is 3, B2 is 2′-OMe, n³ is 7, n⁴ is 0, B3 is 2′-OMe, n⁵ is 3, B1′ is 2′-OMe or 2′-F, q¹ is 9, T1′ is 2′-F, q² is 1, B2′ is 2′-OMe or 2′-F, q³ is 4, T2′ is 2′-F, q⁴ is 2, B3′ is 2′-OMe or 2′-F, q⁵ is 5, T3′ is 2′-F, q⁶ is 1, B4′ is 2′-OMe, and q⁷ is 1; with two phosphorothioate internucleotide linkage modifications within position 1-5 of the sense strand (counting from the 5′-end of the sense strand), and two phosphorothioate internucleotide linkage modifications at positions 1 and 2 and two phosphorothioate internucleotide linkage modifications within positions 18-23 of the antisense strand (counting from the 5′-end of the antisense strand). The RNAi agent also comprises a 5′-PS₂.

[0393] In one embodiment, B1 is 2′-OMe or 2′-F, n¹ is 8, T1 is 2′F, n² is 3, B2 is 2′-OMe, n³ is 7, n⁴ is 0, B3 is 2′-OMe, n⁵ is 3, B1′ is 2′-OMe or 2′-F, q¹ is 9, T1′ is 2′-F, q² is 1, B2′ is 2′-OMe or 2′-F, q³ is 4, T2′ is 2′-F, q⁴ is 2, B3′ is 2′-OMe or 2′-F, q⁵ is 5, T3′ is 2′-F, q⁶ is 1, B4′ is 2′-OMe, and q⁷ is 1; with two phosphorothioate internucleotide linkage modifications within position 1-5 of the sense strand (counting from the 5′-end of the sense strand), and two phosphorothioate internucleotide linkage modifications at positions 1 and 2 and two phosphorothioate internucleotide linkage modifications within positions 18-23 of the antisense strand (counting from the 5′-end of the antisense strand). The RNAi agent also comprises a 5′-deoxy-5′-C-malonyl.

[0394] In one embodiment, B1 is 2′-OMe or 2′-F, n¹ is 8, T1 is 2′F, n² is 3, B2 is 2′-OMe, n³ is 7, n⁴ is 0, B3 is 2′-OMe, n⁵ is 3, B1′ is 2′-OMe or 2′-F, q¹ is 9, T1′ is 2′-F, q² is 1, B2′ is 2′-OMe or 2′-F, q³ is 4, q4 is 0, B3′ is 2′-OMe or 2′-F, q⁵ is 7, T3′ is 2′-F, q⁶ is 1, B4′ is 2′-OMe, and q⁷ is 1. The RNAi agent also comprises a 5′-P.

[0395] In one embodiment, B1 is 2′-OMe or 2′-F, n¹ is 8, T1 is 2′F, n² is 3, B2 is 2′-OMe, n³ is 7, n⁴ is 0, B3 is 2′-OMe, n⁵ is 3, B1′ is 2′-OMe or 2′-F, q¹ is 9, T1′ is 2′-F, q² is 1, B2′ is 2′-OMe or 2′-F, q³ is 4, q⁴ is 0, B3′ is 2′-OMe or 2′-F, q⁵ is 7, T3′ is 2′-F, q⁶ is 1, B4′ is 2′-OMe, and q⁷ is 1. The dsRNA agent also comprises a 5′-PS.

[0396] In one embodiment, B1 is 2′-OMe or 2′-F, n¹ is 8, T1 is 2′F, n² is 3, B2 is 2′-OMe, n³ is 7, n⁴ is 0, B3 is 2′-OMe, n⁵ is 3, B1′ is 2′-OMe or 2′-F, q¹ is 9, T1′ is 2′-F, q² is 1, B2′ is 2′-OMe or 2′-F, q³ is 4, q4 is 0, B3′ is 2′-OMe or 2′-F, q⁵ is 7, T3′ is 2′-F, q⁶ is 1, B4′ is 2′-OMe, and q⁷ is 1. The RNAi agent also comprises a 5′-VP. The 5′-VP may be 5′-E-VP, 5′-Z—VP, or combination thereof. In one embodiment, B1 is 2′-OMe or 2′-F, n¹ is 8, T1 is 2′F, n² is 3, B2 is 2′-OMe, n³ is 7, n⁴ is 0, B3 is 2′-OMe, n⁵ is 3, B1′ is 2′-OMe or 2′-F, q¹ is 9, T1′ is 2′-F, q² is 1, B2′ is 2′-OMe or 2′-F, q³ is 4, q⁴ is 0, B3′ is 2′-OMe or 2′-F, q⁵ is 7, T3′ is 2′-F, q⁶ is 1, B4′ is 2′-OMe, and q⁷ is 1. The RNAi agent also comprises a 5′-PS₂.

[0397] In one embodiment, B1 is 2′-OMe or 2′-F, n¹ is 8, T1 is 2′F, n² is 3, B2 is 2′-OMe, n³ is 7, n⁴ is 0, B3 is 2′-OMe, n⁵ is 3, B1′ is 2′-OMe or 2′-F, q¹ is 9, T1′ is 2′-F, q² is 1, B2′ is 2′-OMe or 2′-F, q³ is 4, q⁴ is 0, B3′ is 2′-OMe or 2′-F, q⁵ is 7, T3′ is 2′-F, q⁶ is 1, B4′ is 2′-OMe, and q⁷ is 1. The RNAi agent also comprises a 5′-deoxy-5′-C-malonyl.

[0398] In one embodiment, B1 is 2′-OMe or 2′-F, n¹ is 8, T1 is 2′F, n² is 3, B2 is 2′-OMe, n³ is 7, n⁴ is 0, B3 is 2′-OMe, n⁵ is 3, B1′ is 2′-OMe or 2′-F, q¹ is 9, T1′ is 2′-F, q² is 1, B2′ is 2′-OMe or 2′-F, q³ is 4, q⁴ is 0, B3′ is 2′-OMe or 2′-F, q⁵ is 7, T3′ is 2′-F, q⁶ is 1, B4′ is 2′-OMe, and q⁷ is 1; with two phosphorothioate internucleotide linkage modifications within position 1-5 of the sense strand (counting from the 5′-end), and two phosphorothioate internucleotide linkage modifications at positions 1 and 2 and two phosphorothioate internucleotide linkage modifications within positions 18-23 of the antisense strand (counting from the 5′-end). The RNAi agent also comprises a 5′-P.

[0399] In one embodiment, B1 is 2′-OMe or 2′-F, n¹ is 8, T1 is 2′F, n² is 3, B2 is 2′-OMe, n³ is 7, n⁴ is 0, B3 is 2′-OMe, n⁵ is 3, B1′ is 2′-OMe or 2′-F, q¹ is 9, T1′ is 2′-F, q² is 1, B2′ is 2′-OMe or 2′-F, q³ is 4, q⁴ is 0, B3′ is 2′-OMe or 2′-F, q⁵ is 7, T3′ is 2′-F, q⁶ is 1, B4′ is 2′-OMe, and q⁷ is 1; with two phosphorothioate internucleotide linkage modifications within position 1-5 of the sense strand (counting from the 5′-end), and two phosphorothioate internucleotide linkage modifications at positions 1 and 2 and two phosphorothioate internucleotide linkage modifications within positions 18-23 of the antisense strand (counting from the 5′-end). The RNAi agent also comprises a 5′-PS.

[0400] In one embodiment, B1 is 2′-OMe or 2′-F, n¹ is 8, T1 is 2′F, n² is 3, B2 is 2′-OMe, n³ is 7, n⁴ is 0, B3 is 2′-OMe, n⁵ is 3, B1′ is 2′-OMe or 2′-F, q¹ is 9, T1′ is 2′-F, q² is 1, B2′ is 2′-OMe or 2′-F, q³ is 4, q⁴ is 0, B3′ is 2′-OMe or 2′-F, q⁵ is 7, T3′ is 2′-F, q⁶ is 1, B4′ is 2′-OMe, and q⁷ is 1; with two phosphorothioate internucleotide linkage modifications within position 1-5 of the sense strand (counting from the 5′-end), and two phosphorothioate internucleotide linkage modifications at positions 1 and 2 and two phosphorothioate internucleotide linkage modifications within positions 18-23 of the antisense strand (counting from the 5′-end). The RNAi agent also comprises a 5′-VP. The 5′-VP may be 5′-E-VP, 5′-Z—VP, or combination thereof.

[0401] In one embodiment, B1 is 2′-OMe or 2′-F, n¹ is 8, T1 is 2′F, n² is 3, B2 is 2′-OMe, n³ is 7, n⁴ is 0, B3 is 2′-OMe, n⁵ is 3, B1′ is 2′-OMe or 2′-F, q¹ is 9, T1′ is 2′-F, q² is 1, B2′ is 2′-OMe or 2′-F, q³ is 4, q⁴ is 0, B3′ is 2′-OMe or 2′-F, q⁵ is 7, T3′ is 2′-F, q⁶ is 1, B4′ is 2′-OMe, and q⁷ is 1; with two phosphorothioate internucleotide linkage modifications within position 1-5 of the sense strand (counting from the 5′-end), and two phosphorothioate internucleotide linkage modifications at positions 1 and 2 and two phosphorothioate internucleotide linkage modifications within positions 18-23 of the antisense strand (counting from the 5′-end). The RNAi agent also comprises a 5′-PS₂.

[0402] In one embodiment, B1 is 2′-OMe or 2′-F, n¹ is 8, T1 is 2′F, n² is 3, B2 is 2′-OMe, n³ is 7, n⁴ is 0, B3 is 2′-OMe, n⁵ is 3, B1′ is 2′-OMe or 2′-F, q¹ is 9, T1′ is 2′-F, q² is 1, B2′ is 2′-OMe or 2′-F, q³ is 4, q⁴ is 0, B3′ is 2′-OMe or 2′-F, q⁵ is 7, T3′ is 2′-F, q⁶ is 1, B4′ is 2′-OMe, and q⁷ is 1; with two phosphorothioate internucleotide linkage modifications within position 1-5 of the sense strand (counting from the 5′-end), and two phosphorothioate internucleotide linkage modifications at positions 1 and 2 and two phosphorothioate internucleotide linkage modifications within positions 18-23 of the antisense strand (counting from the 5′-end). The RNAi agent also comprises a 5′-deoxy-5′-C-malonyl.

[0403] In one embodiment, B1 is 2′-OMe or 2′-F, n¹ is 8, T1 is 2′F, n² is 3, B2 is 2′-OMe, n³ is 7, n⁴ is 0, B3 is 2′OMe, n⁵ is 3, B1′ is 2′-OMe or 2′-F, q¹ is 9, T1′ is 2′-F, q² is 1, B2′ is 2′-OMe or 2′-F, q³ is 4, T2′ is 2′-F, q⁴ is 2, B3′ is 2′-OMe or 2′-F, q⁵ is 5, T3′ is 2′-F, q⁶ is 1, B4′ is 2′-F, and q⁷ is 1. The RNAi agent also comprises a 5′-P.

[0404] In one embodiment, B1 is 2′-OMe or 2′-F, n¹ is 8, T1 is 2′F, n² is 3, B2 is 2′-OMe, n³ is 7, n⁴ is 0, B3 is 2′OMe, n⁵ is 3, B1′ is 2′-OMe or 2′-F, q¹ is 9, T1′ is 2′-F, q² is 1, B2′ is 2′-OMe or 2′-F, q³ is 4, T2′ is 2′-F, q⁴ is 2, B3′ is 2′-OMe or 2′-F, q⁵ is 5, T3′ is 2′-F, q⁶ is 1, B4′ is 2′-F, and q⁷ is 1. The RNAi agent also comprises a 5′-PS.

[0405] In one embodiment, B1 is 2′-OMe or 2′-F, n¹ is 8, T1 is 2′F, n² is 3, B2 is 2′-OMe, n³ is 7, n⁴ is 0, B3 is 2′OMe, n⁵ is 3, B1′ is 2′-OMe or 2′-F, q¹ is 9, T1′ is 2′-F, q² is 1, B2′ is 2′-OMe or 2′-F, q³ is 4, T2′ is 2′-F, q⁴ is 2, B3′ is 2′-OMe or 2′-F, q⁵ is 5, T3′ is 2′-F, q⁶ is 1, B4′ is 2′-F, and q⁷ is 1. The RNAi agent also comprises a 5′-VP. The 5′-VP may be 5′-E-VP, 5′-Z—VP, or combination thereof.

In one embodiment, B1 is 2′-OMe or 2′-F, n¹ is 8, T1 is 2′F, n² is 3, B2 is 2′-OMe, n³ is 7, n⁴ is 0, B3 is 2′OMe, n⁵ is 3, B1′ is 2′-OMe or 2′-F, q¹ is 9, T1′ is 2′-F, q² is 1, B2′ is 2′-OMe or 2′-F, q³ is 4, T2′ is 2′-F, q⁴ is 2, B3′ is 2′-OMe or 2′-F, q⁵ is 5, T3′ is 2′-F, q⁶ is 1, B4′ is 2′-F, and q⁷ is 1. The dsRNAi RNA agent also comprises a 5′-PS₂.

[0406] In one embodiment, B1 is 2′-OMe or 2′-F, n¹ is 8, T1 is 2′F, n² is 3, B2 is 2′-OMe, n³ is 7, n⁴ is 0, B3 is 2′OMe, n⁵ is 3, B1′ is 2′-OMe or 2′-F, q¹ is 9, T1′ is 2′-F, q² is 1, B2′ is 2′-OMe or 2′-F, q³ is 4, T2′ is 2′-F, q⁴ is 2, B3′ is 2′-OMe or 2′-F, q⁵ is 5, T3′ is 2′-F, q⁶ is 1, B4′ is 2′-F, and q⁷ is 1. The RNAi agent also comprises a 5′-deoxy-5′-C-malonyl.

[0407] In one embodiment, B1 is 2′-OMe or 2′-F, n¹ is 8, T1 is 2′F, n² is 3, B2 is 2′-OMe, n³ is 7, n⁴ is 0, B3 is 2′-OMe, n⁵ is 3, B1′ is 2′-OMe or 2′-F, q¹ is 9, T1′ is 2′-F, q² is 1, B2′ is 2′-OMe or 2′-F, q³ is 4, T2′ is 2′-F, q⁴ is 2, B3′ is 2′-OMe or 2′-F, q⁵ is 5, T3′ is 2′-F, q⁶ is 1, B4′ is 2′-F, and q⁷ is 1; with two phosphorothioate internucleotide linkage modifications within position 1-5 of the sense strand (counting from the 5′-end of the sense strand), and two phosphorothioate internucleotide linkage modifications at positions 1 and 2 and two phosphorothioate internucleotide linkage modifications within positions 18-23 of the antisense strand (counting from the 5′-end of the antisense strand). The RNAi agent also comprises a 5′-P.

[0408] In one embodiment, B1 is 2′-OMe or 2′-F, n¹ is 8, T1 is 2′F, n² is 3, B2 is 2′-OMe, n³ is 7, n⁴ is 0, B3 is 2′-OMe, n⁵ is 3, B1′ is 2′-OMe or 2′-F, q¹ is 9, T1′ is 2′-F, q² is 1, B2′ is 2′-OMe or 2′-F, q³ is 4, T2′ is 2′-F, q⁴ is 2, B3′ is 2′-OMe or 2′-F, q⁵ is 5, T3′ is 2′-F, q⁶ is 1, B4′ is 2′-F, and q⁷ is 1; with two phosphorothioate internucleotide linkage modifications within position 1-5 of the sense strand (counting from the 5′-end of the sense strand), and two phosphorothioate internucleotide linkage modifications at positions 1 and 2 and two phosphorothioate internucleotide linkage modifications within positions 18-23 of the antisense strand (counting from the 5′-end of the antisense strand). The RNAi agent also comprises a 5′-PS.

[0409] In one embodiment, B1 is 2′-OMe or 2′-F, n¹ is 8, T1 is 2′F, n² is 3, B2 is 2′-OMe, n³ is 7, n⁴ is 0, B3 is 2′-OMe, n⁵ is 3, B1′ is 2′-OMe or 2′-F, q¹ is 9, T1′ is 2′-F, q² is 1, B2′ is 2′-OMe or 2′-F, q³ is 4, T2′ is 2′-F, q⁴ is 2, B3′ is 2′-OMe or 2′-F, q⁵ is 5, T3′ is 2′-F, q⁶ is 1, B4′ is 2′-F, and q⁷ is 1; with two phosphorothioate internucleotide linkage modifications within position 1-5 of the sense strand (counting from the 5′-end of the sense strand), and two phosphorothioate internucleotide linkage modifications at positions 1 and 2 and two phosphorothioate internucleotide linkage modifications within positions 18-23 of the antisense strand (counting from the 5′-end of the antisense strand). The RNAi agent also comprises a 5′-VP. The 5′-VP may be 5′-E-VP, 5′-Z—VP, or combination thereof.

[0410] In one embodiment, B1 is 2′-OMe or 2′-F, n¹ is 8, T1 is 2′F, n² is 3, B2 is 2′-OMe, n³ is 7, n⁴ is 0, B3 is 2′-OMe, n⁵ is 3, B1′ is 2′-OMe or 2′-F, q¹ is 9, T1′ is 2′-F, q² is 1, B2′ is 2′-OMe or 2′-F, q³ is 4, T2′ is 2′-F, q⁴ is 2, B3′ is 2′-OMe or 2′-F, q⁵ is 5, T3′ is 2′-F, q⁶ is 1, B4′ is 2′-F, and q⁷ is 1; with two phosphorothioate internucleotide linkage modifications within position 1-5 of the sense strand (counting from the 5′-end of the sense strand), and two phosphorothioate internucleotide linkage modifications at positions 1 and 2 and two phosphorothioate internucleotide linkage modifications within positions 18-23 of the antisense strand (counting from the 5′-end of the antisense strand). The RNAi agent also comprises a 5′-PS₂.

[0411] In one embodiment, B1 is 2′-OMe or 2′-F, n¹ is 8, T1 is 2′F, n² is 3, B2 is 2′-OMe, n³ is 7, n⁴ is 0, B3 is 2′-OMe, n⁵ is 3, B1′ is 2′-OMe or 2′-F, q¹ is 9, T1′ is 2′-F, q² is 1, B2′ is 2′-OMe or 2′-F, q³ is 4, T2′ is 2′-F, q⁴ is 2, B3′ is 2′-OMe or 2′-F, q⁵ is 5, T3′ is 2′-F, q⁶ is 1, B4′ is 2′-F, and q⁷ is 1; with two phosphorothioate internucleotide linkage modifications within position 1-5 of the sense strand (counting from the 5′-end of the sense strand), and two phosphorothioate internucleotide linkage modifications at positions 1 and 2 and two phosphorothioate internucleotide linkage modifications within positions 18-23 of the antisense strand (counting from the 5′-end of the antisense strand). The RNAi agent also comprises a 5′-deoxy-5′-C-malonyl.

[0412] In one embodiment, B1 is 2′-OMe or 2′-F, n¹ is 8, T1 is 2′F, n² is 3, B2 is 2′-OMe, n³ is 7, n⁴ is 0, B3 is 2′-OMe, n⁵ is 3, B1′ is 2′-OMe or 2′-F, q¹ is 9, T1′ is 2′-F, q² is 1, B2′ is 2′-OMe or 2′-F, q³ is 4, q⁴ is 0, B3′ is 2′-OMe or 2′-F, q⁵ is 7, T3′ is 2′-F, q⁶ is 1, B4′ is 2′-F, and q⁷ is 1. The RNAi agent also comprises a 5′-P.

[0413] In one embodiment, B1 is 2′-OMe or 2′-F, n¹ is 8, T1 is 2′F, n² is 3, B2 is 2′-OMe, n³ is 7, n⁴ is 0, B3 is 2′-OMe, n⁵ is 3, B1′ is 2′-OMe or 2′-F, q¹ is 9, T1′ is 2′-F, q² is 1, B2′ is 2′-OMe or 2′-F, q³ is 4, q⁴ is 0, B3′ is 2′-OMe or 2′-F, q⁵ is 7, T3′ is 2′-F, q⁶ is 1, B4′ is 2′-F, and q⁷ is 1. The RNAi agent also comprises a 5′-PS.

[0414] In one embodiment, B1 is 2′-OMe or 2′-F, n¹ is 8, T1 is 2′F, n² is 3, B2 is 2′-OMe, n³ is 7, n⁴ is 0, B3 is 2′-OMe, n⁵ is 3, B1′ is 2′-OMe or 2′-F, q¹ is 9, T1′ is 2′-F, q² is 1, B2′ is 2′-OMe or 2′-F, q³ is 4, q⁴ is 0, B3′ is 2′-OMe or 2′-F, q⁵ is 7, T3′ is 2′-F, q⁶ is 1, B4′ is 2′-F, and q⁷ is 1. The RNAi agent also comprises a 5′-VP. The 5′-VP may be 5′-E-VP, 5′-Z—VP, or combination thereof.

[0415] In one embodiment, B1 is 2′-OMe or 2′-F, n¹ is 8, T1 is 2′F, n² is 3, B2 is 2′-OMe, n³ is 7, n⁴ is 0, B3 is 2′-OMe, n⁵ is 3, B1′ is 2′-OMe or 2′-F, q¹ is 9, T1′ is 2′-F, q² is 1, B2′ is 2′-OMe or 2′-F, q³ is 4, q⁴ is 0, B3′ is 2′-OMe or 2′-F, q⁵ is 7, T3′ is 2′-F, q⁶ is 1, B4′ is 2′-F, and q⁷ is 1. The RNAi agent also comprises a 5′-PS₂.

[0416] In one embodiment, B1 is 2′-OMe or 2′-F, n¹ is 8, T1 is 2′F, n² is 3, B2 is 2′-OMe, n³ is 7, n⁴ is 0, B3 is 2′-OMe, n⁵ is 3, B1′ is 2′-OMe or 2′-F, q¹ is 9, T1′ is 2′-F, q² is 1, B2′ is 2′-OMe or 2′-F, q³ is 4, q⁴ is 0, B3′ is 2′-OMe or 2′-F, q⁵ is 7, T3′ is 2′-F, q⁶ is 1, B4′ is 2′-F, and q⁷ is 1. The RNAi agent also comprises a 5′-deoxy-5′-C-malonyl.

[0417] In one embodiment, B1 is 2′-OMe or 2′-F, n¹ is 8, T1 is 2′F, n² is 3, B2 is 2′-OMe, n³ is 7, n⁴ is 0, B3 is 2′-OMe, n⁵ is 3, B1′ is 2′-OMe or 2′-F, q¹ is 9, T1′ is 2′-F, q² is 1, B2′ is 2′-OMe or 2′-F, q³ is 4, q⁴ is 0, B3′ is 2′-OMe or 2′-F, q⁵ is 7, T3′ is 2′-F, q⁶ is 1, B4′ is 2′-F, and q⁷ is 1; with two phosphorothioate internucleotide linkage modifications within position 1-5 of the sense strand (counting from the 5′-end of the sense strand), and two phosphorothioate internucleotide linkage modifications at positions 1 and 2 and two phosphorothioate internucleotide linkage modifications within positions 18-23 of the antisense strand (counting from the 5′-end of the antisense strand). The RNAi agent also comprises a 5′-P.

[0418] In one embodiment, B1 is 2′-OMe or 2′-F, n¹ is 8, T1 is 2′F, n² is 3, B2 is 2′-OMe, n³ is 7, n⁴ is 0, B3 is 2′-OMe, n⁵ is 3, B1′ is 2′-OMe or 2′-F, q¹ is 9, T1′ is 2′-F, q² is 1, B2′ is 2′-OMe or 2′-F, q³ is 4, q⁴ is 0, B3′ is 2′-OMe or 2′-F, q⁵ is 7, T3′ is 2′-F, q⁶ is 1, B4′ is 2′-F, and q⁷ is 1; with two phosphorothioate internucleotide linkage modifications within position 1-5 of the sense strand (counting from the 5′-end of the sense strand), and two phosphorothioate internucleotide linkage modifications at positions 1 and 2 and two phosphorothioate internucleotide linkage modifications within positions 18-23 of the antisense strand (counting from the 5′-end of the antisense strand). The RNAi agent also comprises a 5′-PS.

[0419] In one embodiment, B1 is 2′-OMe or 2′-F, n¹ is 8, T1 is 2′F, n² is 3, B2 is 2′-OMe, n³ is 7, n⁴ is 0, B3 is 2′-OMe, n⁵ is 3, B1′ is 2′-OMe or 2′-F, q¹ is 9, T1′ is 2′-F, q² is 1, B2′ is 2′-OMe or 2′-F, q³ is 4, q⁴ is 0, B3′ is 2′-OMe or 2′-F, q⁵ is 7, T3′ is 2′-F, q⁶ is 1, B4′ is 2′-F, and q⁷ is 1; with two phosphorothioate internucleotide linkage modifications within position 1-5 of the sense strand (counting from the 5′-end of the sense strand), and two phosphorothioate internucleotide linkage modifications at positions 1 and 2 and two phosphorothioate internucleotide linkage modifications within positions 18-23 of the antisense strand (counting from the 5′-end of the antisense strand). The RNAi agent also comprises a 5′-VP. The 5′-VP may be 5′-E-VP, 5′-Z—VP, or combination thereof.

[0420] In one embodiment, B1 is 2′-OMe or 2′-F, n¹ is 8, T1 is 2′F, n² is 3, B2 is 2′-OMe, n³ is 7, n⁴ is 0, B3 is 2′-OMe, n⁵ is 3, B1′ is 2′-OMe or 2′-F, q¹ is 9, T1′ is 2′-F, q² is 1, B2′ is 2′-OMe or 2′-F, q³ is 4, q⁴ is 0, B3′ is 2′-OMe or 2′-F, q⁵ is 7, T3′ is 2′-F, q⁶ is 1, B4′ is 2′-F, and q⁷ is 1; with two phosphorothioate internucleotide linkage modifications within position 1-5 of the sense strand (counting from the 5′-end of the sense strand), and two phosphorothioate internucleotide linkage modifications at positions 1 and 2 and two phosphorothioate internucleotide linkage modifications within positions 18-23 of the antisense strand (counting from the 5′-end of the antisense strand). The RNAi agent also comprises a 5′-PS₂.

[0421] In one embodiment, B1 is 2′-OMe or 2′-F, n¹ is 8, T1 is 2′F, n² is 3, B2 is 2′-OMe, n³ is 7, n⁴ is 0, B3 is 2′-OMe, n⁵ is 3, B1′ is 2′-OMe or 2′-F, q¹ is 9, T1′ is 2′-F, q² is 1, B2′ is 2′-OMe or 2′-F, q³ is 4, q⁴ is 0, B3′ is 2′-OMe or 2′-F, q⁵ is 7, T3′ is 2′-F, q⁶ is 1, B4′ is 2′-F, and q⁷ is 1; with two phosphorothioate internucleotide linkage modifications within position 1-5 of the sense strand (counting from the 5′-end of the sense strand), and two phosphorothioate internucleotide linkage modifications at positions 1 and 2 and two phosphorothioate internucleotide linkage modifications within positions 18-23 of the antisense strand (counting from the 5′-end of the antisense strand). The RNAi agent also comprises a 5′-deoxy-5′-C-malonyl.

[0422] In one embodiment, B1 is 2′-OMe or 2′-F, n¹ is 8, T1 is 2′F, n² is 3, B2 is 2′-OMe, n³ is 7, n⁴ is 0, B3 is 2′-OMe, n⁵ is 3, B1′ is 2′-OMe or 2′-F, q¹ is 9, T1′ is 2′-F, q² is 1, B2′ is 2′-OMe or 2′-F, q³ is 4, T2′ is 2′-F, q⁴ is 2, B3′ is 2′-OMe or 2′-F, q⁵ is 5, T3′ is 2′-F, q⁶ is 1, B4′ is 2′-OMe, and q⁷ is 1; with two phosphorothioate internucleotide linkage modifications within position 1-5 of the sense strand (counting from the 5′-end of the sense strand), and two phosphorothioate internucleotide linkage modifications at positions 1 and 2 and two phosphorothioate internucleotide linkage modifications within positions 18-23 of the antisense strand (counting from the 5′-end of the antisense strand). The RNAi agent also comprises a 5′-P and a targeting ligand. In one embodiment, the 5′-P is at the 5′-end of the antisense strand, and the targeting ligand is at the 3′-end of the sense strand.

[0423] In one embodiment, B1 is 2′-OMe or 2′-F, n¹ is 8, T1 is 2′F, n² is 3, B2 is 2′-OMe, n³ is 7, n⁴ is 0, B3 is 2′-OMe, n⁵ is 3, B1′ is 2′-OMe or 2′-F, q¹ is 9, T1′ is 2′-F, q² is 1, B2′ is 2′-OMe or 2′-F, q³ is 4, T2′ is 2′-F, q⁴ is 2, B3′ is 2′-OMe or 2′-F, q⁵ is 5, T3′ is 2′-F, q⁶ is 1, B4′ is 2′-OMe, and q⁷ is 1; with two phosphorothioate internucleotide linkage modifications within position 1-5 of the sense strand (counting from the 5′-end of the sense strand), and two phosphorothioate internucleotide linkage modifications at positions 1 and 2 and two phosphorothioate internucleotide linkage modifications within positions 18-23 of the antisense strand (counting from the 5′-end of the antisense strand). The RNAi agent also comprises a 5′-PS and a targeting ligand. In one embodiment, the 5′-PS is at the 5′-end of the antisense strand, and the targeting ligand is at the 3′-end of the sense strand.

[0424] In one embodiment, B1 is 2′-OMe or 2′-F, n¹ is 8, T1 is 2′F, n² is 3, B2 is 2′-OMe, n³ is 7, n⁴ is 0, B3 is 2′-OMe, n⁵ is 3, B1′ is 2′-OMe or 2′-F, q¹ is 9, T1′ is 2′-F, q² is 1, B2′ is 2′-OMe or 2′-F, q³ is 4, T2′ is 2′-F, q⁴ is 2, B3′ is 2′-OMe or 2′-F, q⁵ is 5, T3′ is 2′-F, q⁶ is 1, B4′ is 2′-OMe, and q⁷ is 1; with two phosphorothioate internucleotide linkage modifications within position 1-5 of the sense strand (counting from the 5′-end of the sense strand), and two phosphorothioate internucleotide linkage modifications at positions 1 and 2 and two phosphorothioate internucleotide linkage modifications within positions 18-23 of the antisense strand (counting from the 5′-end of the antisense strand). The RNAi agent also comprises a 5′-VP (e.g., a 5′-E-VP, 5′-Z—VP, or combination thereof), and a targeting ligand.

[0425] In one embodiment, the 5′-VP is at the 5′-end of the antisense strand, and the targeting ligand is at the 3′-end of the sense strand.

[0426] In one embodiment, B1 is 2′-OMe or 2′-F, n¹ is 8, T1 is 2′F, n² is 3, B2 is 2′-OMe, n³ is 7, n⁴ is 0, B3 is 2′-OMe, n⁵ is 3, B1′ is 2′-OMe or 2′-F, q¹ is 9, T1′ is 2′-F, q² is 1, B2′ is 2′-OMe or 2′-F, q³ is 4, T2′ is 2′-F, q⁴ is 2, B3′ is 2′-OMe or 2′-F, q⁵ is 5, T3′ is 2′-F, q⁶ is 1, B4′ is 2′-OMe, and q⁷ is 1; with two phosphorothioate internucleotide linkage modifications within position 1-5 of the sense strand (counting from the 5′-end of the sense strand), and two phosphorothioate internucleotide linkage modifications at positions 1 and 2 and two phosphorothioate internucleotide linkage modifications within positions 18-23 of the antisense strand (counting from the 5′-end of the antisense strand). The RNAi agent also comprises a 5′-PS₂ and a targeting ligand. In one embodiment, the 5′-PS₂ is at the 5′-end of the antisense strand, and the targeting ligand is at the 3′-end of the sense strand.

[0427] In one embodiment, B1 is 2′-OMe or 2′-F, n¹ is 8, T1 is 2′F, n² is 3, B2 is 2′-OMe, n³ is 7, n⁴ is 0, B3 is 2′-OMe, n⁵ is 3, B1′ is 2′-OMe or 2′-F, q¹ is 9, T1′ is 2′-F, q² is 1, B2′ is 2′-OMe or 2′-F, q³ is 4, T2′ is 2′-F, q⁴ is 2, B3′ is 2′-OMe or 2′-F, q⁵ is 5, T3′ is 2′-F, q⁶ is 1, B4′ is 2′-OMe, and q⁷ is 1; with two phosphorothioate internucleotide linkage modifications within position 1-5 of the sense strand (counting from the 5′-end of the sense strand), and two phosphorothioate internucleotide linkage modifications at positions 1 and 2 and two phosphorothioate internucleotide linkage modifications within positions 18-23 of the antisense strand (counting from the 5′-end of the antisense strand). The RNAi agent also comprises a 5′-deoxy-5′-C-malonyl and a targeting ligand. In one embodiment, the 5′-deoxy-5′-C-malonyl is at the 5′-end of the antisense strand, and the targeting ligand is at the 3′-end of the sense strand.

[0428] In one embodiment, B1 is 2′-OMe or 2′-F, n¹ is 8, T1 is 2′F, n² is 3, B2 is 2′-OMe, n³ is 7, n⁴ is 0, B3 is 2′-OMe, n⁵ is 3, B1′ is 2′-OMe or 2′-F, q¹ is 9, T1′ is 2′-F, q² is 1, B2′ is 2′-OMe or 2′-F, q³ is 4, q⁴ is 0, B3′ is 2′-OMe or 2′-F, q⁵ is 7, T3′ is 2′-F, q⁶ is 1, B4′ is 2′-OMe, and q⁷ is 1; with two phosphorothioate internucleotide linkage modifications within position 1-5 of the sense strand (counting from the 5′-end), and two phosphorothioate internucleotide linkage modifications at positions 1 and 2 and two phosphorothioate internucleotide linkage modifications within positions 18-23 of the antisense strand (counting from the 5′-end). The RNAi agent also comprises a 5′-P and a targeting ligand. In one embodiment, the 5′-P is at the 5′-end of the antisense strand, and the targeting ligand is at the 3′-end of the sense strand.

[0429] In one embodiment, B1 is 2′-OMe or 2′-F, n¹ is 8, T1 is 2′F, n² is 3, B2 is 2′-OMe, n³ is 7, n⁴ is 0, B3 is 2′-OMe, n⁵ is 3, B1′ is 2′-OMe or 2′-F, q¹ is 9, T1′ is 2′-F, q² is 1, B2′ is 2′-OMe or 2′-F, q³ is 4, q⁴ is 0, B3′ is 2′-OMe or 2′-F, q⁵ is 7, T3′ is 2′-F, q⁶ is 1, B4′ is 2′-OMe, and q⁷ is 1; with two phosphorothioate internucleotide linkage modifications within position 1-5 of the sense strand (counting from the 5′-end), and two phosphorothioate internucleotide linkage modifications at positions 1 and 2 and two phosphorothioate internucleotide linkage modifications within positions 18-23 of the antisense strand (counting from the 5′-end). The RNAi agent also comprises a 5′-PS and a targeting ligand. In one embodiment, the 5′-PS is at the 5′-end of the antisense strand, and the targeting ligand is at the 3′-end of the sense strand.

[0430] In one embodiment, B1 is 2′-OMe or 2′-F, n¹ is 8, T1 is 2′F, n² is 3, B2 is 2′-OMe, n³ is 7, n⁴ is 0, B3 is 2′-OMe, n⁵ is 3, B1′ is 2′-OMe or 2′-F, q¹ is 9, T1′ is 2′-F, q² is 1, B2′ is 2′-OMe or 2′-F, q³ is 4, q⁴ is 0, B3′ is 2′-OMe or 2′-F, q⁵ is 7, T3′ is 2′-F, q⁶ is 1, B4′ is 2′-OMe, and q⁷ is 1; with two phosphorothioate internucleotide linkage modifications within position 1-5 of the sense strand (counting from the 5′-end), and two phosphorothioate internucleotide linkage modifications at positions 1 and 2 and two phosphorothioate internucleotide linkage modifications within positions 18-23 of the antisense strand (counting from the 5′-end). The RNAi agent also comprises a 5′-VP (e.g., a 5′-E-VP, 5′-Z—VP, or combination thereof) and a targeting ligand. In one embodiment, the 5′-VP is at the 5′-end of the antisense strand, and the targeting ligand is at the 3′-end of the sense strand.

[0431] In one embodiment, B1 is 2′-OMe or 2′-F, n¹ is 8, T1 is 2′F, n² is 3, B2 is 2′-OMe, n³ is 7, n⁴ is 0, B3 is 2′-OMe, n⁵ is 3, B1′ is 2′-OMe or 2′-F, q¹ is 9, T1′ is 2′-F, q² is 1, B2′ is 2′-OMe or 2′-F, q³ is 4, q⁴ is 0, B3′ is 2′-OMe or 2′-F, q⁵ is 7, T3′ is 2′-F, q⁶ is 1, B4′ is 2′-OMe, and q⁷ is 1; with two phosphorothioate internucleotide linkage modifications within position 1-5 of the sense strand (counting from the 5′-end), and two phosphorothioate internucleotide linkage modifications at positions 1 and 2 and two phosphorothioate internucleotide linkage modifications within positions 18-23 of the antisense strand (counting from the 5′-end). The RNAi agent also comprises a 5′-PS₂ and a targeting ligand. In one embodiment, the 5′-PS₂ is at the 5′-end of the antisense strand, and the targeting ligand is at the 3′-end of the sense strand.

[0432] In one embodiment, B1 is 2′-OMe or 2′-F, n¹ is 8, T1 is 2′F, n² is 3, B2 is 2′-OMe, n³ is 7, n⁴ is 0, B3 is 2′-OMe, n⁵ is 3, B1′ is 2′-OMe or 2′-F, q¹ is 9, T1′ is 2′-F, q² is 1, B2′ is 2′-OMe or 2′-F, q³ is 4, q⁴ is 0, B3′ is 2′-OMe or 2′-F, q⁵ is 7, T3′ is 2′-F, q⁶ is 1, B4′ is 2′-OMe, and q⁷ is 1; with two phosphorothioate internucleotide linkage modifications within position 1-5 of the sense strand (counting from the 5′-end), and two phosphorothioate internucleotide linkage modifications at positions 1 and 2 and two phosphorothioate internucleotide linkage modifications within positions 18-23 of the antisense strand (counting from the 5′-end). The RNAi agent also comprises a 5′-deoxy-5′-C-malonyl and a targeting ligand. In one embodiment, the 5′-deoxy-5′-C-malonyl is at the 5′-end of the antisense strand, and the targeting ligand is at the 3′-end of the sense strand.

[0433] In one embodiment, B1 is 2′-OMe or 2′-F, n¹ is 8, T1 is 2′F, n² is 3, B2 is 2′-OMe, n³ is 7, n⁴ is 0, B3 is 2′-OMe, n⁵ is 3, B1′ is 2′-OMe or 2′-F, q¹ is 9, T1′ is 2′-F, q² is 1, B2′ is 2′-OMe or 2′-F, q³ is 4, T2′ is 2′-F, q⁴ is 2, B3′ is 2′-OMe or 2′-F, q⁵ is 5, T3′ is 2′-F, q⁶ is 1, B4′ is 2′-F, and q⁷ is 1; with two phosphorothioate internucleotide linkage modifications within position 1-5 of the sense strand (counting from the 5′-end of the sense strand), and two phosphorothioate internucleotide linkage modifications at positions 1 and 2 and two phosphorothioate internucleotide linkage modifications within positions 18-23 of the antisense strand (counting from the 5′-end of the antisense strand). The RNAi agent also comprises a 5′-P and a targeting ligand. In one embodiment, the 5′-P is at the 5′-end of the antisense strand, and the targeting ligand is at the 3′-end of the sense strand.

[0434] In one embodiment, B1 is 2′-OMe or 2′-F, n¹ is 8, T1 is 2′F, n² is 3, B2 is 2′-OMe, n³ is 7, n⁴ is 0, B3 is 2′-OMe, n⁵ is 3, B1′ is 2′-OMe or 2′-F, q¹ is 9, T1′ is 2′-F, q² is 1, B2′ is 2′-OMe or 2′-F, q³ is 4, T2′ is 2′-F, q⁴ is 2, B3′ is 2′-OMe or 2′-F, q⁵ is 5, T3′ is 2′-F, q⁶ is 1, B4′ is 2′-F, and q⁷ is 1; with two phosphorothioate internucleotide linkage modifications within position 1-5 of the sense strand (counting from the 5′-end of the sense strand), and two phosphorothioate internucleotide linkage modifications at positions 1 and 2 and two phosphorothioate internucleotide linkage modifications within positions 18-23 of the antisense strand (counting from the 5′-end of the antisense strand). The RNAi agent also comprises a 5′-PS and a targeting ligand. In one embodiment, the 5′-PS is at the 5′-end of the antisense strand, and the targeting ligand is at the 3′-end of the sense strand.

[0435] In one embodiment, B1 is 2′-OMe or 2′-F, n¹ is 8, T1 is 2′F, n² is 3, B2 is 2′-OMe, n³ is 7, n⁴ is 0, B3 is 2′-OMe, n⁵ is 3, B1′ is 2′-OMe or 2′-F, q¹ is 9, T1′ is 2′-F, q² is 1, B2′ is 2′-OMe or 2′-F, q³ is 4, T2′ is 2′-F, q⁴ is 2, B3′ is 2′-OMe or 2′-F, q⁵ is 5, T3′ is 2′-F, q⁶ is 1, B4′ is 2′-F, and q⁷ is 1; with two phosphorothioate internucleotide linkage modifications within position 1-5 of the sense strand (counting from the 5′-end of the sense strand), and two phosphorothioate internucleotide linkage modifications at positions 1 and 2 and two phosphorothioate internucleotide linkage modifications within positions 18-23 of the antisense strand (counting from the 5′-end of the antisense strand). The RNAi agent also comprises a 5′-VP (e.g., a 5′-E-VP, 5′-Z—VP, or combination thereof) and a targeting ligand. In one embodiment, the 5′-VP is at the 5′-end of the antisense strand, and the targeting ligand is at the 3′-end of the sense strand.

[0436] In one embodiment, B1 is 2′-OMe or 2′-F, n¹ is 8, T1 is 2′F, n² is 3, B2 is 2′-OMe, n³ is 7, n⁴ is 0, B3 is 2′-OMe, n⁵ is 3, B1′ is 2′-OMe or 2′-F, q¹ is 9, T1′ is 2′-F, q² is 1, B2′ is 2′-OMe or 2′-F, q³ is 4, T2′ is 2′-F, q⁴ is 2, B3′ is 2′-OMe or 2′-F, q⁵ is 5, T3′ is 2′-F, q⁶ is 1, B4′ is 2′-F, and q⁷ is 1; with two phosphorothioate internucleotide linkage modifications within position 1-5 of the sense strand (counting from the 5′-end of the sense strand), and two phosphorothioate internucleotide linkage modifications at positions 1 and 2 and two phosphorothioate internucleotide linkage modifications within positions 18-23 of the antisense strand (counting from the 5′-end of the antisense strand). The RNAi agent also comprises a 5′-PS₂ and a targeting ligand. In one embodiment, the 5′-PS₂ is at the 5′-end of the antisense strand, and the targeting ligand is at the 3′-end of the sense strand.

[0437] In one embodiment, B1 is 2′-OMe or 2′-F, n¹ is 8, T1 is 2′F, n² is 3, B2 is 2′-OMe, n³ is 7, n⁴ is 0, B3 is 2′-OMe, n⁵ is 3, B1′ is 2′-OMe or 2′-F, q¹ is 9, T1′ is 2′-F, q² is 1, B2′ is 2′-OMe or 2′-F, q³ is 4, T2′ is 2′-F, q⁴ is 2, B3′ is 2′-OMe or 2′-F, q⁵ is 5, T3′ is 2′-F, q⁶ is 1, B4′ is 2′-F, and q⁷ is 1; with two phosphorothioate internucleotide linkage modifications within position 1-5 of the sense strand (counting from the 5′-end of the sense strand), and two phosphorothioate internucleotide linkage modifications at positions 1 and 2 and two phosphorothioate internucleotide linkage modifications within positions 18-23 of the antisense strand (counting from the 5′-end of the antisense strand). The RNAi agent also comprises a 5′-deoxy-5′-C-malonyl and a targeting ligand. In one embodiment, the 5′-deoxy-5′-C-malonyl is at the 5′-end of the antisense strand, and the targeting ligand is at the 3′-end of the sense strand.

[0438] In one embodiment, B1 is 2′-OMe or 2′-F, n¹ is 8, T1 is 2′F, n² is 3, B2 is 2′-OMe, n³ is 7, n⁴ is 0, B3 is 2′-OMe, n⁵ is 3, B1′ is 2′-OMe or 2′-F, q¹ is 9, T1′ is 2′-F, q² is 1, B2′ is 2′-OMe or 2′-F, q³ is 4, q⁴ is 0, B3′ is 2′-OMe or 2′-F, q⁵ is 7, T3′ is 2′-F, q⁶ is 1, B4′ is 2′-F, and q⁷ is 1; with two phosphorothioate internucleotide linkage modifications within position 1-5 of the sense strand (counting from the 5′-end of the sense strand), and two phosphorothioate internucleotide linkage modifications at positions 1 and 2 and two phosphorothioate internucleotide linkage modifications within positions 18-23 of the antisense strand (counting from the 5′-end of the antisense strand). The RNAi agent also comprises a 5′-P and a targeting ligand. In one embodiment, the 5′-P is at the 5′-end of the antisense strand, and the targeting ligand is at the 3′-end of the sense strand.

[0439] In one embodiment, B1 is 2′-OMe or 2′-F, n¹ is 8, T1 is 2′F, n² is 3, B2 is 2′-OMe, n³ is 7, n⁴ is 0, B3 is 2′-OMe, n⁵ is 3, B1′ is 2′-OMe or 2′-F, q¹ is 9, T1′ is 2′-F, q² is 1, B2′ is 2′-OMe or 2′-F, q³ is 4, q⁴ is 0, B3′ is 2′-OMe or 2′-F, q⁵ is 7, T3′ is 2′-F, q⁶ is 1, B4′ is 2′-F, and q⁷ is 1; with two phosphorothioate internucleotide linkage modifications within position 1-5 of the sense strand (counting from the 5′-end of the sense strand), and two phosphorothioate internucleotide linkage modifications at positions 1 and 2 and two phosphorothioate internucleotide linkage modifications within positions 18-23 of the antisense strand (counting from the 5′-end of the antisense strand). The RNAi agent also comprises a 5′-PS and a targeting ligand. In one embodiment, the 5′-PS is at the 5′-end of the antisense strand, and the targeting ligand is at the 3′-end of the sense strand.

[0440] In one embodiment, B1 is 2′-OMe or 2′-F, n¹ is 8, T1 is 2′F, n² is 3, B2 is 2′-OMe, n³ is 7, n⁴ is 0, B3 is 2′-OMe, n⁵ is 3, B1′ is 2′-OMe or 2′-F, q¹ is 9, T1′ is 2′-F, q² is 1, B2′ is 2′-OMe or 2′-F, q³ is 4, q⁴ is 0, B3′ is 2′-OMe or 2′-F, q⁵ is 7, T3′ is 2′-F, q⁶ is 1, B4′ is 2′-F, and q⁷ is 1; with two phosphorothioate internucleotide linkage modifications within position 1-5 of the sense strand (counting from the 5′-end of the sense strand), and two phosphorothioate internucleotide linkage modifications at positions 1 and 2 and two phosphorothioate internucleotide linkage modifications within positions 18-23 of the antisense strand (counting from the 5′-end of the antisense strand). The RNAi agent also comprises a 5′-VP (e.g., a 5′-E-VP, 5′-Z—VP, or combination thereof) and a targeting ligand. In one embodiment, the 5′-VP is at the 5′-end of the antisense strand, and the targeting ligand is at the 3′-end of the sense strand.

[0441] In one embodiment, B1 is 2′-OMe or 2′-F, n¹ is 8, T1 is 2′F, n² is 3, B2 is 2′-OMe, n³ is 7, n⁴ is 0, B3 is 2′-OMe, n⁵ is 3, B1′ is 2′-OMe or 2′-F, q¹ is 9, T1′ is 2′-F, q² is 1, B2′ is 2′-OMe or 2′-F, q³ is 4, q⁴ is 0, B3′ is 2′-OMe or 2′-F, q⁵ is 7, T3′ is 2′-F, q⁶ is 1, B4′ is 2′-F, and q⁷ is 1; with two phosphorothioate internucleotide linkage modifications within position 1-5 of the sense strand (counting from the 5′-end of the sense strand), and two phosphorothioate internucleotide linkage modifications at positions 1 and 2 and two phosphorothioate internucleotide linkage modifications within positions 18-23 of the antisense strand (counting from the 5′-end of the antisense strand). The RNAi agent also comprises a 5′-PS₂ and a targeting ligand. In one embodiment, the 5′-PS₂ is at the 5′-end of the antisense strand, and the targeting ligand is at the 3′-end of the sense strand.

[0442] In one embodiment, B1 is 2′-OMe or 2′-F, n¹ is 8, T1 is 2′F, n² is 3, B2 is 2′-OMe, n³ is 7, n⁴ is 0, B3 is 2′-OMe, n⁵ is 3, B1′ is 2′-OMe or 2′-F, q¹ is 9, T1′ is 2′-F, q² is 1, B2′ is 2′-OMe or 2′-F, q³ is 4, q⁴ is 0, B3′ is 2′-OMe or 2′-F, q⁵ is 7, T3′ is 2′-F, q⁶ is 1, B4′ is 2′-F, and q⁷ is 1; with two phosphorothioate internucleotide linkage modifications within position 1-5 of the sense strand (counting from the 5′-end of the sense strand), and two phosphorothioate internucleotide linkage modifications at positions 1 and 2 and two phosphorothioate internucleotide linkage modifications within positions 18-23 of the antisense strand (counting from the 5′-end of the antisense strand). The RNAi agent also comprises a 5′-deoxy-5′-C-malonyl and a targeting ligand. In one embodiment, the 5′-deoxy-5′-C-malonyl is at the 5′-end of the antisense strand, and the targeting ligand is at the 3′-end of the sense strand.

[0443] In a particular embodiment, an RNAi agent of the present invention comprises:
[0444] (a) a sense strand having:
   [0445] (i) a length of 21 nucleotides;
   [0446] (ii) an ASGPR ligand attached to the 3′-end, wherein said ASGPR ligand comprises three GalNAc derivatives attached through a trivalent branched linker; and
   [0447] (iii) 2′-F modifications at positions 1, 3, 5, 7, 9 to 11, 13, 17, 19, and 21, and 2′-OMe modifications at positions 2, 4, 6, 8, 12, 14 to 16, 18, and 20 (counting from the 5′ end); and
[0448] (b) an antisense strand having:
   [0449] (i) a length of 23 nucleotides;
   [0450] (ii) 2′-OMe modifications at positions 1, 3, 5, 9, 11 to 13, 15, 17, 19, 21, and 23, and 2′F modifications at positions 2, 4, 6 to 8, 10, 14, 16, 18, 20, and 22 (counting from the 5′ end); and
   [0451] (iii) phosphorothioate internucleotide linkages between nucleotide positions 21 and 22, and between nucleotide positions 22 and 23 (counting from the 5′ end);
[0452] wherein the dsRNA agents have a two nucleotide overhang at the 3′-end of the antisense strand, and a blunt end at the 5′-end of the antisense strand.

[0453] In another particular embodiment, an RNAi agent of the present invention comprises:
[0454] (a) a sense strand having:
[0455] (i) a length of 21 nucleotides;
[0456] (ii) an ASGPR ligand attached to the 3′-end, wherein said ASGPR ligand comprises three GalNAc derivatives attached through a trivalent branched linker;
[0457] (iii) 2′-F modifications at positions 1, 3, 5, 7, 9 to 11, 13, 15, 17, 19, and 21, and 2′-OMe modifications at positions 2, 4, 6, 8, 12, 14, 16, 18, and 20 (counting from the 5′ end); and
[0458] (iv) phosphorothioate internucleotide linkages between nucleotide positions 1 and 2, and between nucleotide positions 2 and 3 (counting from the 5′ end);
[0459] and
[0460] (b) an antisense strand having:
   [0461] (i) a length of 23 nucleotides;
   [0462] (ii) 2′-OMe modifications at positions 1, 3, 5, 7, 9, 11 to 13, 15, 17, 19, and 21 to 23, and 2′F modifications at positions 2, 4, 6, 8, 10, 14, 16, 18, and 20 (counting from the 5′ end); and
   [0463] (iii) phosphorothioate internucleotide linkages between nucleotide positions 1 and 2, between nucleotide positions 2 and 3, between nucleotide positions 21 and 22, and between nucleotide positions 22 and 23 (counting from the 5′ end);
      wherein the RNAi agents have a two nucleotide overhang at the 3′-end of the antisense strand, and a blunt end at the 5′-end of the antisense strand.

[0464] In another particular embodiment, a RNAi agent of the present invention comprises:
[0465] (a) a sense strand having:
   [0466] (i) a length of 21 nucleotides;
   [0467] (ii) an ASGPR ligand attached to the 3′-end, wherein said ASGPR ligand comprises three GalNAc derivatives attached through a trivalent branched linker;
   [0468] (iii) 2′-OMe modifications at positions 1 to 6, 8, 10, and 12 to 21, 2′-F modifications at positions 7, and 9, and a deoxy-nucleotide (e.g. dT) at position 11 (counting from the 5′ end); and
   [0469] (iv) phosphorothioate internucleotide linkages between nucleotide positions 1 and 2, and between nucleotide positions 2 and 3 (counting from the 5′ end);
[0470] and
[0471] (b) an antisense strand having:
   [0472] (i) a length of 23 nucleotides;
   [0473] (ii) 2′-OMe modifications at positions 1, 3, 7, 9, 11, 13, 15, 17, and 19 to 23, and 2′-F modifications at positions 2, 4 to 6, 8, 10, 12, 14, 16, and 18 (counting from the 5′ end); and
   [0474] (iii) phosphorothioate internucleotide linkages between nucleotide positions 1 and 2, between nucleotide positions 2 and 3, between nucleotide positions 21 and 22, and between nucleotide positions 22 and 23 (counting from the 5′ end);
      wherein the RNAi agents have a two nucleotide overhang at the 3′-end of the antisense strand, and a blunt end at the 5′-end of the antisense strand.

[0475] In another particular embodiment, a RNAi agent of the present invention comprises:
[0476] (a) a sense strand having:
   [0477] (i) a length of 21 nucleotides;
   [0478] (ii) an ASGPR ligand attached to the 3′-end, wherein said ASGPR ligand comprises three GalNAc derivatives attached through a trivalent branched linker;
   [0479] (iii) 2′-OMe modifications at positions 1 to 6, 8, 10, 12, 14, and 16 to 21, and 2′-F modifications at positions 7, 9, 11, 13, and 15; and
   [0480] (iv) phosphorothioate internucleotide linkages between nucleotide positions 1 and 2, and between nucleotide positions 2 and 3 (counting from the 5′ end);
[0481] and
[0482] (b) an antisense strand having:
   [0483] (i) a length of 23 nucleotides;
   [0484] (ii) 2′-OMe modifications at positions 1, 5, 7, 9, 11, 13, 15, 17, 19, and 21 to 23, and 2′-F modifications at positions 2 to 4, 6, 8, 10, 12, 14, 16, 18, and 20 (counting from the 5′ end); and
   [0485] (iii) phosphorothioate internucleotide linkages between nucleotide positions 1 and 2, between nucleotide positions 2 and 3, between nucleotide positions 21 and 22, and between nucleotide positions 22 and 23 (counting from the 5′ end);
      wherein the RNAi agents have a two nucleotide overhang at the 3′-end of the antisense strand, and a blunt end at the 5′-end of the antisense strand.

[0486] In another particular embodiment, a RNAi agent of the present invention comprises:
[0487] (a) a sense strand having:
   [0488] (i) a length of 21 nucleotides;
   [0489] (ii) an ASGPR ligand attached to the 3′-end, wherein said ASGPR ligand comprises three GalNAc derivatives attached through a trivalent branched linker;
   [0490] (iii) 2′-OMe modifications at positions 1 to 9, and 12 to 21, and 2′-F modifications at positions 10, and 11; and
   [0491] (iv) phosphorothioate internucleotide linkages between nucleotide positions 1 and 2, and between nucleotide positions 2 and 3 (counting from the 5′ end);
[0492] and
[0493] (b) an antisense strand having:
   [0494] (i) a length of 23 nucleotides;
   [0495] (ii) 2′-OMe modifications at positions 1, 3, 5, 7, 9, 11 to 13, 15, 17, 19, and 21 to 23, and 2′-F modifications at positions 2, 4, 6, 8, 10, 14, 16, 18, and 20 (counting from the 5′ end); and
   [0496] (iii) phosphorothioate internucleotide linkages between nucleotide positions 1 and 2, between nucleotide positions 2 and 3, between nucleotide positions 21 and 22, and between nucleotide positions 22 and 23 (counting from the 5′ end);
      wherein the RNAi agents have a two nucleotide overhang at the 3′-end of the antisense strand, and a blunt end at the 5′-end of the antisense strand.

[0497] In another particular embodiment, a RNAi agent of the present invention comprises:
[0498] (a) a sense strand having:
   [0499] (i) a length of 21 nucleotides;
   [0500] (ii) an ASGPR ligand attached to the 3′-end, wherein said ASGPR ligand comprises three GalNAc derivatives attached through a trivalent branched linker;
   [0501] (iii) 2′-F modifications at positions 1, 3, 5, 7, 9 to 11, and 13, and 2′-OMe modifications at positions 2, 4, 6, 8, 12, and 14 to 21; and
   [0502] (iv) phosphorothioate internucleotide linkages between nucleotide positions 1 and 2, and between nucleotide positions 2 and 3 (counting from the 5′ end);
[0503] and
[0504] (b) an antisense strand having:
   [0505] (i) a length of 23 nucleotides;
   [0506] (ii) 2′-OMe modifications at positions 1, 3, 5 to 7, 9, 11 to 13, 15, 17 to 19, and 21 to 23, and 2′-F modifications at positions 2, 4, 8, 10, 14, 16, and 20 (counting from the 5′ end); and
   [0507] (iii) phosphorothioate internucleotide linkages between nucleotide positions 1 and 2, between nucleotide positions 2 and 3, between nucleotide positions 21 and 22, and between nucleotide positions 22 and 23 (counting from the 5′ end);
      wherein the RNAi agents have a two nucleotide overhang at the 3′-end of the antisense strand, and a blunt end at the 5′-end of the antisense strand.

[0508] In another particular embodiment, a RNAi agent of the present invention comprises:
[0509] (a) a sense strand having:
   [0510] (i) a length of 21 nucleotides;
   [0511] (ii) an ASGPR ligand attached to the 3′-end, wherein said ASGPR ligand comprises three GalNAc derivatives attached through a trivalent branched linker;
   [0512] (iii) 2′-OMe modifications at positions 1, 2, 4, 6, 8, 12, 14, 15, 17, and 19 to 21, and 2′-F modifications at positions 3, 5, 7, 9 to 11, 13, 16, and 18; and
   [0513] (iv) phosphorothioate internucleotide linkages between nucleotide positions 1 and 2, and between nucleotide positions 2 and 3 (counting from the 5′ end);
[0514] and
[0515] (b) an antisense strand having:
   [0516] (i) a length of 25 nucleotides;
   [0517] (ii) 2′-OMe modifications at positions 1, 4, 6, 7, 9, 11 to 13, 15, 17, and 19 to 23, 2′-F modifications at positions 2, 3, 5, 8, 10, 14, 16, and 18, and desoxy-nucleotides (e.g. dT) at positions 24 and 25 (counting from the 5′ end); and
   [0518] (iii) phosphorothioate internucleotide linkages between nucleotide positions 1 and 2, between nucleotide positions 2 and 3, between nucleotide positions 21 and 22, and between nucleotide positions 22 and 23 (counting from the 5′ end);
      wherein the RNAi agents have a four nucleotide overhang at the 3′-end of the antisense strand, and a blunt end at the 5′-end of the antisense strand.

[0519] In another particular embodiment, a RNAi agent of the present invention comprises:
[0520] (a) a sense strand having:
   [0521] (i) a length of 21 nucleotides;
   [0522] (ii) an ASGPR ligand attached to the 3′-end, wherein said ASGPR ligand comprises three GalNAc derivatives attached through a trivalent branched linker;
   [0523] (iii) 2′-OMe modifications at positions 1 to 6, 8, and 12 to 21, and 2′-F modifications at positions 7, and 9 to 11; and
   [0524] (iv) phosphorothioate internucleotide linkages between nucleotide positions 1 and 2, and between nucleotide positions 2 and 3 (counting from the 5′ end);
[0525] and
[0526] (b) an antisense strand having:
   [0527] (i) a length of 23 nucleotides;
   [0528] (ii) 2′-OMe modifications at positions 1, 3 to 5, 7, 8, 10 to 13, 15, and 17 to 23, and 2′-F modifications at positions 2, 6, 9, 14, and 16 (counting from the 5′ end); and
   [0529] (iii) phosphorothioate internucleotide linkages between nucleotide positions 1 and 2, between nucleotide positions 2 and 3, between nucleotide positions 21 and 22, and between nucleotide positions 22 and 23 (counting from the 5′ end);
      wherein the RNAi agents have a two nucleotide overhang at the 3′-end of the antisense strand, and a blunt end at the 5′-end of the antisense strand.

[0530] In another particular embodiment, a RNAi agent of the present invention comprises:
[0531] (a) a sense strand having:
   [0532] (i) a length of 21 nucleotides;
   [0533] (ii) an ASGPR ligand attached to the 3′-end, wherein said ASGPR ligand comprises three GalNAc derivatives attached through a trivalent branched linker;
   [0534] (iii) 2′-OMe modifications at positions 1 to 6, 8, and 12 to 21, and 2′-F modifications at positions 7, and 9 to 11; and
   [0535] (iv) phosphorothioate internucleotide linkages between nucleotide positions 1 and 2, and between nucleotide positions 2 and 3 (counting from the 5′ end);
[0536] and
[0537] (b) an antisense strand having:
   [0538] (i) a length of 23 nucleotides;
   [0539] (ii) 2′-OMe modifications at positions 1, 3 to 5, 7, 10 to 13, 15, and 17 to 23, and 2′-F modifications at positions 2, 6, 8, 9, 14, and 16 (counting from the 5′ end); and
   [0540] (iii) phosphorothioate internucleotide linkages between nucleotide positions 1 and 2, between nucleotide positions 2 and 3, between nucleotide positions 21 and 22, and between nucleotide positions 22 and 23 (counting from the 5′ end);
      wherein the RNAi agents have a two nucleotide overhang at the 3′-end of the antisense strand, and a blunt end at the 5′-end of the antisense strand.

[0541] In another particular embodiment, a RNAi agent of the present invention comprises:
[0542] (a) a sense strand having:
   [0543] (i) a length of 19 nucleotides;
   [0544] (ii) an ASGPR ligand attached to the 3′-end, wherein said ASGPR ligand comprises three GalNAc derivatives attached through a trivalent branched linker;
   [0545] (iii) 2′-OMe modifications at positions 1 to 4, 6, and 10 to 19, and 2′-F modifications at positions 5, and 7 to 9; and
   [0546] (iv) phosphorothioate internucleotide linkages between nucleotide positions 1 and 2, and between nucleotide positions 2 and 3 (counting from the 5′ end);
[0547] and
[0548] (b) an antisense strand having:
   [0549] (i) a length of 21 nucleotides;
   [0550] (ii) 2′-OMe modifications at positions 1, 3 to 5, 7, 10 to 13, 15, and 17 to 21, and 2′-F modifications at positions 2, 6, 8, 9, 14, and 16 (counting from the 5′ end); and
   [0551] (iii) phosphorothioate internucleotide linkages between nucleotide positions 1 and 2, between nucleotide positions 2 and 3, between nucleotide positions 19 and 20, and between nucleotide positions 20 and 21 (counting from the 5′ end);
      wherein the RNAi agents have a two nucleotide overhang at the 3′-end of the antisense strand, and a blunt end at the 5′-end of the antisense strand.

[0552] In certain embodiments, the iRNA for use in the methods of the invention is an agent selected from agents listed in any one of Tables 2-5. These agents may further comprise a ligand.

### III. iRNAs Conjugated to Ligands

[0553] Another modification of the RNA of an iRNA of the invention involves chemically linking to the iRNA one or more ligands, moieties or conjugates that enhance the activity, cellular distribution, or cellular uptake of the iRNA e.g., into a cell. Such moieties include but are not limited to lipid moieties such as a cholesterol moiety (Letsinger et al., Proc. Natl. Acid. Sci. USA, 1989, 86: 6553-6556). In other embodiments, the ligand is cholic acid (Manoharan et al., Biorg. Med. Chem. Let., 1994, 4:1053-1060), a thioether, e.g., beryl-S-tritylthiol (Manoharan et al., Ann. N.Y. Acad. Sci., 1992, 660:306-309; Manoharan et al., Biorg. Med. Chem. Let., 1993, 3:2765-2770), a thiocholesterol (Oberhauser et al., Nucl. Acids Res., 1992, 20:533-538), an aliphatic chain, e.g., dodecandiol or undecyl residues (Saison-Behmoaras et al., EMBO J, 1991, 10:1111-1118; Kabanov et al., FEBS Lett., 1990, 259:327-330; Svinarchuk et al., Biochimie, 1993, 75:49-54), a phospholipid, e.g., di-hexadecyl-rac-glycerol or triethyl-ammonium 1,2-di-O-hexadecyl-rac-glycero-3-phosphonate (Manoharan et al., Tetrahedron Lett., 1995, 36:3651-3654; Shea et al., Nucl. Acids Res., 1990, 18:3777-3783), a polyamine or a polyethylene glycol chain (Manoharan et al., Nucleosides & Nucleotides, 1995, 14:969-973), or adamantane acetic acid (Manoharan et al., Tetrahedron Lett., 1995, 36:3651-3654), a palmityl moiety (Mishra et al., Biochim. Biophys. Acta, 1995, 1264:229-237), or an octadecylamine or hexylamino-carbonyloxycholesterol moiety (Crooke et al., J. Pharmacol. Exp. Ther., 1996, 277:923-937).

[0554] In certain embodiments, a ligand alters the distribution, targeting, or lifetime of an iRNA agent into which it is incorporated. In certain embodiments a ligand provides an enhanced affinity for a selected target, e.g., molecule, cell or cell type, compartment, e.g., a cellular or organ compartment, tissue, organ or region of the body, as, e.g., compared to a species absent such a ligand. In some embodiments, ligands do not take part in duplex pairing in a duplexed nucleic acid.

[0555] Ligands can include a naturally occurring substance, such as a protein (e.g., human serum albumin (HSA), low-density lipoprotein (LDL), or globulin); carbohydrate (e.g., a dextran, pullulan, chitin, chitosan, inulin, cyclodextrin, N-acetylglucosamine, N-acetylgalactosamine, or hyaluronic acid); or a lipid. The ligand can also be a recombinant or synthetic molecule, such as a synthetic polymer, e.g., a synthetic polyamino acid. Examples of polyamino acids include polyamino acid is a polylysine (PLL), poly L-aspartic acid, poly L-glutamic acid, styrene-maleic acid anhydride copolymer, poly(L-lactide-co-glycolied) copolymer, divinyl ether-maleic anhydride copolymer, N-(2-hydroxypropyl)methacrylamide copolymer (HMPA), polyethylene glycol (PEG), polyvinyl alcohol (PVA), polyurethane, poly(2-ethylacryllic acid), N-isopropylacrylamide polymers, or polyphosphazine. Example of polyamines include: polyethylenimine, polylysine (PLL), spermine, spermidine, polyamine, pseudopeptide-polyamine, peptidomimetic polyamine, dendrimer polyamine, arginine, amidine, protamine, cationic lipid, cationic porphyrin, quaternary salt of a polyamine, or an alpha helical peptide.

[0556] Ligands can also include targeting groups, e.g., a cell or tissue targeting agent, e.g., a lectin, glycoprotein, lipid or protein, e.g., an antibody, that binds to a specified cell type such as a kidney cell. A targeting group can be a thyrotropin, melanotropin, lectin, glycoprotein, surfactant protein A, Mucin carbohydrate, multivalent lactose, multivalent galactose, N-acetyl-galactosamine, N-acetyl-glucosamine multivalent mannose, multivalent fucose, glycosylated polyaminoacids, multivalent galactose, transferrin, bisphosphonate, polyglutamate, polyaspartate, a lipid, cholesterol, a steroid, bile acid, folate, vitamin B12, vitamin A, biotin, or an RGD peptide or RGD peptide mimetic. In certain embodiments, the ligand is a multivalent galactose, e.g., an N-acetyl-galactosamine.

[0557] Other examples of ligands include dyes, intercalating agents (e.g. acridines), cross-linkers (e.g. psoralene, mitomycin C), porphyrins (TPPC4, texaphyrin, Sapphyrin), polycyclic aromatic hydrocarbons (e.g., phenazine, dihydrophenazine), artificial endonucleases (e.g. EDTA), lipophilic molecules, e.g., cholesterol, cholic acid, adamantane acetic acid, 1-pyrene butyric acid, dihydrotestosterone, 1,3-Bis-O(hexadecyl)glycerol, geranyloxyhexyl group, hexadecylglycerol, borneol, menthol, 1,3-propanediol, heptadecyl group, palmitic acid, myristic acid,O3-(oleoyl)lithocholic acid, O3-(oleoyl)cholenic acid, dimethoxytrityl, or phenoxazine) and peptide conjugates (e.g., antennapedia peptide, Tat peptide), alkylating agents, phosphate, amino, mercapto, PEG (e.g., PEG-40K), MPEG, [MPEG]₂, polyamino, alkyl, substituted alkyl, radiolabeled markers, enzymes, haptens (e.g. biotin), transport/absorption facilitators (e.g., aspirin, vitamin E, folic acid), synthetic ribonucleases (e.g., imidazole, bisimidazole, histamine, imidazole clusters, acridine-imidazole conjugates, Eu3+ complexes of tetraazamacrocycles), dinitrophenyl, HRP, or AP.

[0558] Ligands can be proteins, e.g., glycoproteins, or peptides, e.g., molecules having a specific affinity for a co-ligand, or antibodies e.g., an antibody, that binds to a specified cell type such as a hepatic cell. Ligands can also include hormones and hormone receptors. They can also include non-peptidic species, such as lipids, lectins, carbohydrates, vitamins, cofactors, multivalent lactose, multivalent galactose, N-acetyl-galactosamine, N-acetyl-glucosamine multivalent mannose, or multivalent fucose. The ligand can be, for example, a lipopolysaccharide, an activator of p38 MAP kinase, or an activator of NF-κB.

[0559] The ligand can be a substance, e.g., a drug, which can increase the uptake of the iRNA agent into the cell, for example, by disrupting the cell's cytoskeleton, e.g., by disrupting the cell's microtubules, microfilaments, or intermediate filaments. The drug can be, for example, taxol, vincristine, vinblastine, cytochalasin, nocodazole, japlakinolide, latrunculin A, phalloidin, swinholide A, indanocine, or myoservin.

[0560] In some embodiments, a ligand attached to an iRNA as described herein acts as a pharmacokinetic modulator (PK modulator). PK modulators include lipophiles, bile acids, steroids, phospholipid analogues, peptides, protein binding agents, PEG, vitamins, etc. Exemplary PK modulators include, but are not limited to, cholesterol, fatty acids, cholic acid, lithocholic acid, dialkylglycerides, diacylglyceride, phospholipids, sphingolipids, naproxen, ibuprofen, vitamin E, biotin. Oligonucleotides that comprise a number of phosphorothioate linkages are also known to bind to serum protein, thus short oligonucleotides, e.g., oligonucleotides of about 5 bases, 10 bases, 15 bases, or 20 bases, comprising multiple of phosphorothioate linkages in the backbone are also amenable to the present invention as ligands (e.g. as PK modulating ligands). In addition, aptamers that bind serum components (e.g. serum proteins) are also suitable for use as PK modulating ligands in the embodiments described herein.

[0561] Ligand-conjugated iRNAs of the invention may be synthesized by the use of an oligonucleotide that bears a pendant reactive functionality, such as that derived from the attachment of a linking molecule onto the oligonucleotide (described below). This reactive oligonucleotide may be reacted directly with commercially-available ligands, ligands that are synthesized bearing any of a variety of protecting groups, or ligands that have a linking moiety attached thereto.

[0562] The oligonucleotides used in the conjugates of the present invention may be conveniently and routinely made through the well-known technique of solid-phase synthesis. Equipment for such synthesis is sold by several vendors including, for example, Applied Biosystems® (Foster City, Calif.). Any other methods for such synthesis known in the art may additionally or alternatively be employed. It is also known to use similar techniques to prepare other oligonucleotides, such as the phosphorothioates and alkylated derivatives.

[0563] In the ligand-conjugated iRNAs and ligand-molecule bearing sequence-specific linked nucleosides of the present invention, the oligonucleotides and oligonucleosides may be assembled on a suitable DNA synthesizer utilizing standard nucleotide or nucleoside precursors, or nucleotide or nucleoside conjugate precursors that already bear the linking moiety, ligand-nucleotide or nucleoside-conjugate precursors that already bear the ligand molecule, or non-nucleoside ligand-bearing building blocks.

[0564] When using nucleotide-conjugate precursors that already bear a linking moiety, the synthesis of the sequence-specific linked nucleosides is typically completed, and the ligand molecule is then reacted with the linking moiety to form the ligand-conjugated oligonucleotide. In some embodiments, the oligonucleotides or linked nucleosides of the present invention are synthesized by an automated synthesizer using phosphoramidites derived from ligand-nucleoside conjugates in addition to the standard phosphoramidites and non-standard phosphoramidites that are commercially available and routinely used in oligonucleotide synthesis.

[0565] A. Lipid Conjugates

[0566] In certain embodiments, the ligand or conjugate is a lipid or lipid-based molecule. Such a lipid or lipid-based molecule in some embodiments binds a serum protein, e.g., human serum albumin (HSA). An HSA binding ligand allows for distribution of the conjugate to a target tissue, e.g., a non-kidney target tissue of the body. For example, the target tissue can be the liver, including parenchymal cells of the liver. Other molecules that can bind HSA can also be used as ligands. For example, naproxen or aspirin can be used. A lipid or lipid-based ligand can (a) increase resistance to degradation of the conjugate, (b) increase targeting or transport into a target cell or cell membrane, or (c) can be used to adjust binding to a serum protein, e.g., HSA.

[0567] A lipid based ligand can be used to inhibit, e.g., control the binding of the conjugate to a target tissue. For example, a lipid or lipid-based ligand that binds to HSA more strongly will be less likely to be targeted to the kidney and therefore less likely to be cleared from the body. A lipid or lipid-based ligand that binds to HSA less strongly can be used to target the conjugate to the kidney.

[0568] In certain embodiments, the lipid based ligand binds HSA. In some embodiments, it binds HSA with a sufficient affinity such that the conjugate will be in some embodiments distributed to a non-kidney tissue. However, it is preferred that the affinity not be so strong that the HSA-ligand binding cannot be reversed.

[0569] In other embodiments, the lipid based ligand binds HSA weakly or not at all, such that the conjugate will be in some embodiments distributed to the kidney. Other moieties that target to kidney cells can also be used in place of, or in addition to, the lipid based ligand.

[0570] In another aspect, the ligand is a moiety, e.g., a vitamin, which is taken up by a target cell, e.g., a proliferating cell. These are particularly useful for treating disorders characterized by unwanted cell proliferation, e.g., of the malignant or non-malignant type, e.g., cancer cells.

[0571] Exemplary vitamins include vitamin A, E, and K. Other exemplary vitamins include are B vitamin, e.g., folic acid, B12, riboflavin, biotin, pyridoxal or other vitamins or nutrients taken up by target cells such as liver cells. Also included are HSA and low density lipoprotein (LDL).

[0572] B. Cell Permeation Agents

[0573] In another aspect, the ligand is a cell-permeation agent, in some embodiments a helical cell-permeation agent. In some embodiments, the agent is amphipathic. An exemplary agent is a peptide such as tat or antennopedia. If the agent is a peptide, it can be modified, including a peptidylmimetic, invertomers, non-peptide or pseudo-peptide linkages, and use of D-amino acids. The helical agent is in some embodiments an alpha-helical agent, which in some embodiments has a lipophilic and a lipophobic phase.

[0574] The ligand can be a peptide or peptidomimetic. A peptidomimetic (also referred to herein as an oligopeptidomimetic) is a molecule capable of folding into a defined three-dimensional structure similar to a natural peptide. The attachment of peptide and peptidomimetics to iRNA agents can affect pharmacokinetic distribution of the iRNA, such as by enhancing cellular recognition and absorption. The peptide or peptidomimetic moiety can be about 5-50 amino acids long, e.g., about 5, 10, 15, 20, 25, 30, 35, 40, 45, or 50 amino acids long.

[0575] A peptide or peptidomimetic can be, for example, a cell permeation peptide, cationic peptide, amphipathic peptide, or hydrophobic peptide (e.g., consisting primarily of Tyr, Trp, or Phe). The peptide moiety can be a dendrimer peptide, constrained peptide or crosslinked peptide. In another alternative, the peptide moiety can include a hydrophobic membrane translocation sequence (MTS). An exemplary hydrophobic MTS-containing peptide is RFGF having the amino acid sequence AAVALLPAVLLALLAP (SEQ ID NO: 37). An RFGF analogue (e.g., amino acid sequence AALLPVLLAAP (SEQ ID NO:38) containing a hydrophobic MTS can also be a targeting moiety. The peptide moiety can be a “delivery” peptide, which can carry large polar molecules including peptides, oligonucleotides, and protein across cell membranes. For example, sequences from the HIV Tat protein (GRKKRRQRRRPPQ (SEQ ID NO:39) and the Drosophila Antennapedia protein (RQIKIWFQNRRMKWKK (SEQ ID NO:40) have been found to be capable of functioning as delivery peptides. A peptide or peptidomimetic can be encoded by a random sequence of DNA, such as a peptide identified from a phage-display library, or one-bead-one-compound (OBOC) combinatorial library (Lam et al., Nature, 354:82-84, 1991). Examples of a peptide or peptidomimetic tethered to a dsRNA agent via an incorporated monomer unit for cell targeting purposes is an arginine-glycine-aspartic acid (RGD)-peptide, or RGD mimic. A peptide moiety can range in length from about 5 amino acids to about 40 amino acids. The peptide moieties can have a structural modification, such as to increase stability or direct conformational properties. Any of the structural modifications described below can be utilized.

[0576] An RGD peptide for use in the compositions and methods of the invention may be linear or cyclic, and may be modified, e.g., glycosylated or methylated, to facilitate targeting to a specific tissue(s). RGD-containing peptides and peptidiomimemtics may include D-amino acids, as well as synthetic RGD mimics. In addition to RGD, one can use other moieties that target the integrin ligand. Exemplary conjugates of this ligand target PECAM-1 or VEGF.

[0577] A “cell permeation peptide” is capable of permeating a cell, e.g., a microbial cell, such as a bacterial or fungal cell, or a mammalian cell, such as a human cell. A microbial cell-permeating peptide can be, for example, an α-helical linear peptide (e.g., LL-37 or Ceropin P1), a disulfide bond-containing peptide (e.g., α-defensin, β-defensin or bactenecin), or a peptide containing only one or two dominating amino acids (e.g., PR-39 or indolicidin). A cell permeation peptide can also include a nuclear localization signal (NLS). For example, a cell permeation peptide can be a bipartite amphipathic peptide, such as MPG, which is derived from the fusion peptide domain of HIV-1 gp41 and the NLS of SV40 large T antigen (Simeoni et al., Nucl. Acids Res. 31:2717-2724, 2003).

[0578] C. Carbohydrate Conjugates

[0579] In some embodiments of the compositions and methods of the invention, an iRNA further comprises a carbohydrate. The carbohydrate conjugated iRNA is advantageous for the in vivo delivery of nucleic acids, as well as compositions suitable for in vivo therapeutic use, as described herein. As used herein, “carbohydrate” refers to a compound which is either a carbohydrate per se made up of one or more monosaccharide units having at least 6 carbon atoms (which can be linear, branched or cyclic) with an oxygen, nitrogen or sulfur atom bonded to each carbon atom; or a compound having as a part thereof a carbohydrate moiety made up of one or more monosaccharide units each having at least six carbon atoms (which can be linear, branched or cyclic), with an oxygen, nitrogen or sulfur atom bonded to each carbon atom. Representative carbohydrates include the sugars (mono-, di-, tri-, and oligosaccharides containing from about 4, 5, 6, 7, 8, or 9 monosaccharide units), and polysaccharides such as starches, glycogen, cellulose and polysaccharide gums. Specific monosaccharides include C5 and above (e.g., C5, C6, C7, or C8) sugars; di- and trisaccharides include sugars having two or three monosaccharide units (e.g., C5, C6, C7, or C8).

[0580] In certain embodiments, a carbohydrate conjugate for use in the compositions and methods of the invention is a monosaccharide.

[0581] In certain embodiments, the monosaccharide is an N-acetylgalactosamine (GalNAc). GalNAc conjugates, which comprise one or more N-acetylgalactosamine (GalNAc) derivatives, are described, for example, in U.S. Pat. No. 8,106,022, the entire content of which is hereby incorporated herein by reference. In some embodiments, the GalNAc conjugate serves as a ligand that targets the iRNA to particular cells. In some embodiments, the GalNAc conjugate targets the iRNA to liver cells, e.g., by serving as a ligand for the asialoglycoprotein receptor of liver cells (e.g., hepatocytes).

[0582] In some embodiments, the carbohydrate conjugate comprises one or more GalNAc derivatives. The GalNAc derivatives may be attached via a linker, e.g., a bivalent or trivalent branched linker. In some embodiments the GalNAc conjugate is conjugated to the 3′ end of the sense strand. In some embodiments, the GalNAc conjugate is conjugated to the iRNA agent (e.g., to the 3′ end of the sense strand) via a linker, e.g., a linker as described herein. In some embodiments the GalNAc conjugate is conjugated to the 5′ end of the sense strand. In some embodiments, the GalNAc conjugate is conjugated to the iRNA agent (e.g., to the 5′ end of the sense strand) via a linker, e.g., a linker as described herein.

[0583] In certain embodiments of the invention, the GalNAc or GalNAc derivative is attached to an iRNA agent of the invention via a monovalent linker. In some embodiments, the GalNAc or GalNAc derivative is attached to an iRNA agent of the invention via a bivalent linker. In yet other embodiments of the invention, the GalNAc or GalNAc derivative is attached to an iRNA agent of the invention via a trivalent linker. In other embodiments of the invention, the GalNAc or GalNAc derivative is attached to an iRNA agent of the invention via a tetravalent linker.

[0584] In certain embodiments, the double stranded RNAi agents of the invention comprise one GalNAc or GalNAc derivative attached to the iRNA agent. In certain embodiments, the double stranded RNAi agents of the invention comprise a plurality (e.g., 2, 3, 4, 5, or 6) GalNAc or GalNAc derivatives, each independently attached to a plurality of nucleotides of the double stranded RNAi agent through a plurality of monovalent linkers.

[0585] In some embodiments, for example, when the two strands of an iRNA agent of the invention are part of one larger molecule connected by an uninterrupted chain of nucleotides between the 3′-end of one strand and the 5′-end of the respective other strand forming a hairpin loop comprising, a plurality of unpaired nucleotides, each unpaired nucleotide within the hairpin loop may independently comprise a GalNAc or GalNAc derivative attached via a monovalent linker. The hairpin loop may also be formed by an extended overhang in one strand of the duplex.

[0586] In some embodiments, for example, when the two strands of an iRNA agent of the invention are part of one larger molecule connected by an uninterrupted chain of nucleotides between the 3′-end of one strand and the 5′-end of the respective other strand forming a hairpin loop comprising, a plurality of unpaired nucleotides, each unpaired nucleotide within the hairpin loop may independently comprise a GalNAc or GalNAc derivative attached via a monovalent linker. The hairpin loop may also be formed by an extended overhang in one strand of the duplex.

[0587] In one embodiment, a carbohydrate conjugate for use in the compositions and methods of the invention is selected from the group consisting of:

[chemical structure]

[chemical structure]

[chemical structure]

[chemical structure]

[chemical structure]

wherein Y is O or S and n is 3-6 (Formula XXIV);

[chemical structure]

wherein Y is O or S and n is 3-6 (Formula XXV);

[chemical structure]

wherein X is O or S (Formula XXVII);

[chemical structure]

[chemical structure]

[chemical structure]

[0588] In another embodiment, a carbohydrate conjugate for use in the compositions and methods of the invention is a monosaccharide. In one embodiment, the monosaccharide is an N-acetylgalactosamine, such as

[chemical structure]

[0589] In some embodiments, the RNAi agent is attached to the carbohydrate conjugate via a linker as shown in the following schematic, wherein X is O or S

[chemical structure]

[0590] In some embodiments, the RNAi agent is conjugated to L96 as defined in Table 1 and shown below:

[chemical structure]

[0591] Another representative carbohydrate conjugate for use in the embodiments described herein includes, but is not limited to,

[chemical structure]

(Formula XXXVI), when one of X or Y is an oligonucleotide, the other is a hydrogen.

[0592] In some embodiments, a suitable ligand is a ligand disclosed in WO 2019/055633, the entire contents of which are incorporated herein by reference. In one embodiment the ligand comprises the structure below:

[chemical structure]

[0593] In certain embodiments of the invention, the GalNAc or GalNAc derivative is attached to an iRNA agent of the invention via a monovalent linker. In some embodiments, the GalNAc or GalNAc derivative is attached to an iRNA agent of the invention via a bivalent linker. In yet other embodiments of the invention, the GalNAc or GalNAc derivative is attached to an iRNA agent of the invention via a trivalent linker.

[0594] In one embodiment, the double stranded RNAi agents of the invention comprise one or more GalNAc or GalNAc derivative attached to the iRNA agent. The GalNAc may be attached to any nucleotide via a linker on the sense strand or antsisense strand. The GalNac may be attached to the 5′-end of the sense strand, the 3′ end of the sense strand, the 5′-end of the antisense strand, or the 3′-end of the antisense strand. In one embodiment, the GalNAc is attached to the 3′ end of the sense strand, e.g., via a trivalent linker.

[0595] In other embodiments, the double stranded RNAi agents of the invention comprise a plurality (e.g., 2, 3, 4, 5, or 6) GalNAc or GalNAc derivatives, each independently attached to a plurality of nucleotides of the double stranded RNAi agent through a plurality of linkers, e.g., monovalent linkers.

[0596] In some embodiments, for example, when the two strands of an iRNA agent of the invention is part of one larger molecule connected by an uninterrupted chain of nucleotides between the 3′-end of one strand and the 5′-end of the respective other strand forming a hairpin loop comprising, a plurality of unpaired nucleotides, each unpaired nucleotide within the hairpin loop may independently comprise a GalNAc or GalNAc derivative attached via a monovalent linker.

[0597] In some embodiments, the carbohydrate conjugate further comprises one or more additional ligands as described above, such as, but not limited to, a PK modulator or a cell permeation peptide.

[0598] Additional carbohydrate conjugates and linkers suitable for use in the present invention include those described in PCT Publication Nos. WO 2014/179620 and WO 2014/179627, the entire contents of each of which are incorporated herein by reference.

[0599] D. Linkers

[0600] In some embodiments, the conjugate or ligand described herein can be attached to an iRNA oligonucleotide with various linkers that can be cleavable or non-cleavable.

[0601] The term “linker” or “linking group” means an organic moiety that connects two parts of a compound, e.g., covalently attaches two parts of a compound. Linkers typically comprise a direct bond or an atom such as oxygen or sulfur, a unit such as NR8, C(O), C(O)NH, SO, SO₂, SO₂NH or a chain of atoms, such as, but not limited to, substituted or unsubstituted alkyl, substituted or unsubstituted alkenyl, substituted or unsubstituted alkynyl, arylalkyl, arylalkenyl, arylalkynyl, heteroarylalkyl, heteroarylalkenyl, heteroarylalkynyl, heterocyclylalkyl, heterocyclylalkenyl, heterocyclylalkynyl, aryl, heteroaryl, heterocyclyl, cycloalkyl, cycloalkenyl, alkylarylalkyl, alkylarylalkenyl, alkylarylalkynyl, alkenylarylalkyl, alkenylarylalkenyl, alkenylarylalkynyl, alkynylarylalkyl, alkynylarylalkenyl, alkynylarylalkynyl, alkylheteroarylalkyl, alkylheteroarylalkenyl, alkylheteroarylalkynyl, alkenylheteroarylalkyl, alkenylheteroarylalkenyl, alkenylheteroarylalkynyl, alkynylheteroarylalkyl, alkynylheteroarylalkenyl, alkynylheteroarylalkynyl, alkylheterocyclylalkyl, alkylheterocyclylalkenyl, alkylhererocyclylalkynyl, alkenylheterocyclylalkyl, alkenylheterocyclylalkenyl, alkenylheterocyclylalkynyl, alkynylheterocyclylalkyl, alkynylheterocyclylalkenyl, alkynylheterocyclylalkynyl, alkylaryl, alkenylaryl, alkynylaryl, alkylheteroaryl, alkenylheteroaryl, alkynylhereroaryl, which one or more methylenes can be interrupted or terminated by O, S, S(O), SO₂, N(R8), C(O), substituted or unsubstituted aryl, substituted or unsubstituted heteroaryl, or substituted or unsubstituted heterocyclic; where R8 is hydrogen, acyl, aliphatic, or substituted aliphatic. In one embodiment, the linker is about 1-24 atoms, 2-24, 3-24, 4-24, 5-24, 6-24, 6-18, 7-18, 8-18, 7-17, 8-17, 6-16, 7-17, or 8-16 atoms.

[0602] A cleavable linking group is one which is sufficiently stable outside the cell, but which upon entry into a target cell is cleaved to release the two parts the linker is holding together. In certain embodiments, the cleavable linking group is cleaved at least about 10 times, 20, times, 30 times, 40 times, 50 times, 60 times, 70 times, 80 times, 90 times, or more, or at least 100 times faster in a target cell or under a first reference condition (which can, e.g., be selected to mimic or represent intracellular conditions) than in the blood of a subject, or under a second reference condition (which can, e.g., be selected to mimic or represent conditions found in the blood or serum).

[0603] Cleavable linking groups are susceptible to cleavage agents, e.g., pH, redox potential, or the presence of degradative molecules. Generally, cleavage agents are more prevalent or found at higher levels or activities inside cells than in serum or blood. Examples of such degradative agents include: redox agents which are selected for particular substrates or which have no substrate specificity, including, e.g., oxidative or reductive enzymes or reductive agents such as mercaptans, present in cells, that can degrade a redox cleavable linking group by reduction; esterases; endosomes or agents that can create an acidic environment, e.g., those that result in a pH of five or lower; enzymes that can hydrolyze or degrade an acid cleavable linking group by acting as a general acid, peptidases (which can be substrate specific), and phosphatases.

[0604] A cleavable linkage group, such as a disulfide bond can be susceptible to pH. The pH of human serum is 7.4, while the average intracellular pH is slightly lower, ranging from about 7.1-7.3. Endosomes have a more acidic pH, in the range of 5.5-6.0, and lysosomes have an even more acidic pH at around 5.0. Some linkers will have a cleavable linking group that is cleaved at a certain pH, thereby releasing a cationic lipid from the ligand inside the cell, or into the desired compartment of the cell.

[0605] A linker can include a cleavable linking group that is cleavable by a particular enzyme. The type of cleavable linking group incorporated into a linker can depend on the cell to be targeted. For example, a liver-targeting ligand can be linked to a cationic lipid through a linker that includes an ester group. Liver cells are rich in esterases, and therefore the linker will be cleaved more efficiently in liver cells than in cell types that are not esterase-rich. Other cell-types rich in esterases include cells of the lung, renal cortex, and testis.

[0606] Linkers that contain peptide bonds can be used when targeting cell types rich in peptidases, such as liver cells and synoviocytes.

[0607] In general, the suitability of a candidate cleavable linking group can be evaluated by testing the ability of a degradative agent (or condition) to cleave the candidate linking group. It will also be desirable to also test the candidate cleavable linking group for the ability to resist cleavage in the blood or when in contact with other non-target tissue. Thus, one can determine the relative susceptibility to cleavage between a first and a second condition, where the first is selected to be indicative of cleavage in a target cell and the second is selected to be indicative of cleavage in other tissues or biological fluids, e.g., blood or serum. The evaluations can be carried out in cell free systems, in cells, in cell culture, in organ or tissue culture, or in whole animals. It can be useful to make initial evaluations in cell-free or culture conditions and to confirm by further evaluations in whole animals. In some embodiments, useful candidate compounds are cleaved at least about 2, 4, 10, 20, 30, 40, 50, 60, 70, 80, 90, or 100 times faster in the cell (or under in vitro conditions selected to mimic intracellular conditions) as compared to blood or serum (or under in vitro conditions selected to mimic extracellular conditions).

[0608] i. Redox Cleavable Linking Groups

[0609] In certain embodiments, a cleavable linking group is a redox cleavable linking group that is cleaved upon reduction or oxidation. An example of reductively cleavable linking group is a disulphide linking group (—S—S—). To determine if a candidate cleavable linking group is a suitable “reductively cleavable linking group,” or for example is suitable for use with a particular iRNA moiety and particular targeting agent one can look to methods described herein. For example, a candidate can be evaluated by incubation with dithiothreitol (DTT), or other reducing agent using reagents know in the art, which mimic the rate of cleavage which would be observed in a cell, e.g., a target cell. The candidates can also be evaluated under conditions which are selected to mimic blood or serum conditions. In one, candidate compounds are cleaved by at most about 10% in the blood. In other embodiments, useful candidate compounds are degraded at least about 2, 4, 10, 20, 30, 40, 50, 60, 70, 80, 90, or about 100 times faster in the cell (or under in vitro conditions selected to mimic intracellular conditions) as compared to blood (or under in vitro conditions selected to mimic extracellular conditions). The rate of cleavage of candidate compounds can be determined using standard enzyme kinetics assays under conditions chosen to mimic intracellular media and compared to conditions chosen to mimic extracellular media.

[0610] ii. Phosphate-Based Cleavable Linking Groups

[0611] In certain embodiments, a cleavable linker comprises a phosphate-based cleavable linking group. A phosphate-based cleavable linking group is cleaved by agents that degrade or hydrolyze the phosphate group. An example of an agent that cleaves phosphate groups in cells are enzymes such as phosphatases in cells. Examples of phosphate-based linking groups are —O—P(O)(ORk)-O—, —O—P(S)(ORk)-O—, —O—P(S)(SRk)-O—, —S—P(O)(ORk)-O—, —O—P(O)(ORk)-S—, —S—P(O)(ORk)-S—, —O—P(S)(ORk)-S—, —S—P(S)(ORk)-O—, —O—P(O)(Rk)-O—, —O—P(S)(Rk)-O—, —S—P(O)(Rk)-O—, —S—P(S)(Rk)-O—, —S—P(O)(Rk)-S—, —O—P(S)(Rk)-S, wherein Rk at each occurrence can be, independently, C1-C20 alkyl, C1-C20 haloalkyl, C6-C10 aryl, or C7-C12 aralkyl. Exemplary embodiments include —O—P(O)(OH)—O—, —O—P(S)(OH)—O—, —O—P(S)(SH)—O—, —S—P(O)(OH)—O—, —O—P(O)(OH)—S—, —S—P(O)(OH)—S—, —O—P(S)(OH)—S—, —S—P(S)(OH)—O—, —O—P(O)(H)—O—, —O—P(S)(H)—O—, —S—P(O)(H)—O, —S—P(S)(H)—O—, —S—P(O)(H)—S—, and —O—P(S)(H)—S—. In one embodiment, a phosphate-based linking group is —O—P(O)(OH)—O—. These candidates can be evaluated using methods analogous to those described above.

[0612] iii. Acid Cleavable Linking Groups

[0613] In certain embodiments, a cleavable linker comprises an acid cleavable linking group. An acid cleavable linking group is a linking group that is cleaved under acidic conditions. In some embodiments acid cleavable linking groups are cleaved in an acidic environment with a pH of about 6.5 or lower (e.g., about 6.0, 5.75, 5.5, 5.25, 5.0, or lower), or by agents such as enzymes that can act as a general acid. In a cell, specific low pH organelles, such as endosomes and lysosomes can provide a cleaving environment for acid cleavable linking groups. Examples of acid cleavable linking groups include but are not limited to hydrazones, esters, and esters of amino acids. Acid cleavable groups can have the general formula —C═NN—, C(O)O, or —OC(O). An exemplary embodiment is when the carbon attached to the oxygen of the ester (the alkoxy group) is an aryl group, substituted alkyl group, or tertiary alkyl group such as dimethyl pentyl or t-butyl. These candidates can be evaluated using methods analogous to those described above.

[0614] iv. Ester-Based Linking Groups

[0615] In other embodiments, a cleavable linker comprises an ester-based cleavable linking group. An ester-based cleavable linking group is cleaved by enzymes such as esterases and amidases in cells. Examples of ester-based cleavable linking groups include, but are not limited to, esters of alkylene, alkenylene and alkynylene groups. Ester cleavable linking groups have the general formula —C(O)O—, or —OC(O)—. These candidates can be evaluated using methods analogous to those described above.

[0616] v. Peptide-Based Cleaving Groups

[0617] In yet other embodiments, a cleavable linker comprises a peptide-based cleavable linking group. A peptide-based cleavable linking group is cleaved by enzymes such as peptidases and proteases in cells. Peptide-based cleavable linking groups are peptide bonds formed between amino acids to yield oligopeptides (e.g., dipeptides, tripeptides etc.) and polypeptides. Peptide-based cleavable groups do not include the amide group (—C(O)NH—). The amide group can be formed between any alkylene, alkenylene or alkynelene. A peptide bond is a special type of amide bond formed between amino acids to yield peptides and proteins. The peptide based cleavage group is generally limited to the peptide bond (i.e., the amide bond) formed between amino acids yielding peptides and proteins and does not include the entire amide functional group. Peptide-based cleavable linking groups have the general formula —NHCHRAC(O)NHCHRBC(O)—, where RA and RB are the R groups of the two adjacent amino acids. These candidates can be evaluated using methods analogous to those described above.

[0618] In some embodiments, an iRNA of the invention is conjugated to a carbohydrate through a linker. Non-limiting examples of iRNA carbohydrate conjugates with linkers of the compositions and methods of the invention include, but are not limited to,

[chemical structure]

[chemical structure]

[chemical structure]

when one of X or Y is an oligonucleotide, the other is a hydrogen.

[0619] In certain embodiments of the compositions and methods of the invention, a ligand is one or more “GalNAc” (N-acetylgalactosamine) derivatives attached through a bivalent or trivalent branched linker.

[0620] In one embodiment, a dsRNA of the invention is conjugated to a bivalent or trivalent branched linker selected from the group of structures shown in any of formula (XLV)-(XLVI):

[chemical structure]

[0621] wherein:
[0622] q2A, q2B, q3A, q3B, q4A, q4B, q5A, q5B and q5C represent independently for each occurrence 0-20 and wherein the repeating unit can be the same or different;
[0623] P^{2A}, P^{2B}, P^{3A}, P^{3B}, P^{4A}, P^{4B}, P^{5A}, P^{5B}, P^{5C}, T^{2A}, T^{2B}, T^{3A}, T^{3B}, T^{4A}, T^{4B}, T^{4A}, T^{5B}, T^{5C} are each independently for each occurrence absent, CO, NH, O, S, OC(O), NHC(O), CH₂, CH₂NH or CH₂O;
[0624] Q^{2A}, Q^{2B}, Q^{3A}, Q^{3B}, Q^{4A}, Q^{4B}, Q^{5A}, Q^{5B}, Q^{5C} are independently for each occurrence absent, alkylene, substituted alkylene wherein one or more methylenes can be interrupted or terminated by one or more of O, S, S(O), SO₂, N(R^{N}), C(R′)═C(R″), C≡C or C(O);
[0625] R^{2A}, R^{2B}, R^{3A}, R^{3B}, R^{4A}, R^{4B}, R^{5A}, R^{5B}, R^{5C} are each independently for each occurrence absent NH, O, S, CH₂, C(O)O, C(O)NH, NHCH(R^{a})C(O), —C(O)—CH(R^{a})—NH—, CO. CH═N—O,

[chemical structure]

or heterocyclyl;
[0626] L^{2A}, L^{2B}, L^{3A}, L^{3B}, L^{4A}, L^{4B}, L^{5A}, L^{5B} and L^{5C} represent the ligand; i.e. each independently for each occurrence a monosaccharide (such as GalNAc), disaccharide, trisaccharide, tetrasaccharide, oligosaccharide, or polysaccharide; and R^{a} is H or amino acid side chain. Trivalent conjugating GalNAc derivatives are particularly useful for use with RNAi agents for inhibiting the expression of a target gene, such as those of formula (XLIX):

[chemical structure]

wherein L^{5A}, L^{5B} and L^{5C} represent a monosaccharide, such as GalNAc derivative.

[0627] Examples of suitable bivalent and trivalent branched linker groups conjugating GalNAc derivatives include, but are not limited to, the structures recited above as formulas II, VII, XI, X, and XIII.

[0628] Representative U.S. patents that teach the preparation of RNA conjugates include, but are not limited to, U.S. Pat. Nos. 4,828,979; 4,948,882; 5,218,105; 5,525,465; 5,541,313; 5,545,730; 5,552,538; 5,578,717, 5,580,731; 5,591,584; 5,109,124; 5,118,802; 5,138,045; 5,414,077; 5,486,603; 5,512,439; 5,578,718; 5,608,046; 4,587,044; 4,605,735; 4,667,025; 4,762,779; 4,789,737; 4,824,941; 4,835,263; 4,876,335; 4,904,582; 4,958,013; 5,082,830; 5,112,963; 5,214,136; 5,082,830; 5,112,963; 5,214,136; 5,245,022; 5,254,469; 5,258,506; 5,262,536; 5,272,250; 5,292,873; 5,317,098; 5,371,241, 5,391,723; 5,416,203, 5,451,463; 5,510,475; 5,512,667; 5,514,785; 5,565,552; 5,567,810; 5,574,142; 5,585,481; 5,587,371; 5,595,726; 5,597,696; 5,599,923; 5,599,928; 5,688,941; 6,294,664; 6,320,017; 6,576,752; 6,783,931; 6,900,297; 7,037,646; and 8,106,022, the entire contents of each of which are hereby incorporated herein by reference.

[0629] It is not necessary for all positions in a given compound to be uniformly modified, and in fact more than one of the aforementioned modifications can be incorporated in a single compound or even at a single nucleoside within an iRNA. The present invention also includes iRNA compounds that are chimeric compounds.

[0630] “Chimeric” iRNA compounds or “chimeras,” in the context of this invention, are iRNA compounds, in some embodiments dsRNAi agents, that contain two or more chemically distinct regions, each made up of at least one monomer unit, i.e., a nucleotide in the case of a dsRNA compound. These iRNAs typically contain at least one region wherein the RNA is modified so as to confer upon the iRNA increased resistance to nuclease degradation, increased cellular uptake, or increased binding affinity for the target nucleic acid. An additional region of the iRNA can serve as a substrate for enzymes capable of cleaving RNA:DNA or RNA:RNA hybrids. By way of example, RNase H is a cellular endonuclease which cleaves the RNA strand of an RNA:DNA duplex. Activation of RNase H, therefore, results in cleavage of the RNA target, thereby greatly enhancing the efficiency of iRNA inhibition of gene expression. Consequently, comparable results can often be obtained with shorter iRNAs when chimeric dsRNAs are used, compared to phosphorothioate deoxy dsRNAs hybridizing to the same target region. Cleavage of the RNA target can be routinely detected by gel electrophoresis and, if necessary, associated nucleic acid hybridization techniques known in the art.

[0631] In certain instances, the RNA of an iRNA can be modified by a non-ligand group. A number of non-ligand molecules have been conjugated to iRNAs in order to enhance the activity, cellular distribution or cellular uptake of the iRNA, and procedures for performing such conjugations are available in the scientific literature. Such non-ligand moieties have included lipid moieties, such as cholesterol (Kubo, T. et al., Biochem. Biophys. Res. Comm., 2007, 365(1):54-61; Letsinger et al., Proc. Natl. Acad. Sci. USA, 1989, 86:6553), cholic acid (Manoharan et al., Bioorg. Med. Chem. Lett., 1994, 4:1053), a thioether, e.g., hexyl-S-tritylthiol (Manoharan et al., Ann. N.Y. Acad. Sci., 1992, 660:306; Manoharan et al., Bioorg. Med. Chem. Let., 1993, 3:2765), a thiocholesterol (Oberhauser et al., Nucl. Acids Res., 1992, 20:533), an aliphatic chain, e.g., dodecandiol or undecyl residues (Saison-Behmoaras et al., EMBO J., 1991, 10:111; Kabanov et al., FEBS Lett., 1990, 259:327; Svinarchuk et al., Biochimie, 1993, 75:49), a phospholipid, e.g., di-hexadecyl-rac-glycerol or triethylammonium 1,2-di-O-hexadecyl-rac-glycero-3-H-phosphonate (Manoharan et al., Tetrahedron Lett., 1995, 36:3651; Shea et al., Nucl. Acids Res., 1990, 18:3777), a polyamine or a polyethylene glycol chain (Manoharan et al., Nucleosides & Nucleotides, 1995, 14:969), or adamantane acetic acid (Manoharan et al., Tetrahedron Lett., 1995, 36:3651), a palmityl moiety (Mishra et al., Biochim. Biophys. Acta, 1995, 1264:229), or an octadecylamine or hexylamino-carbonyl-oxycholesterol moiety (Crooke et al., J. Pharmacol. Exp. Ther., 1996, 277:923). Representative United States patents that teach the preparation of such RNA conjugates have been listed above. Typical conjugation protocols involve the synthesis of RNAs bearing an aminolinker at one or more positions of the sequence. The amino group is then reacted with the molecule being conjugated using appropriate coupling or activating reagents. The conjugation reaction can be performed either with the RNA still bound to the solid support or following cleavage of the RNA, in solution phase. Purification of the RNA conjugate by HPLC typically affords the pure conjugate.

### IV. Delivery of an iRNA of the Invention

[0632] The delivery of an iRNA of the invention to a cell e.g., a cell within a subject, such as a human subject (e.g., a subject in need thereof, such as a subject susceptible to or diagnosed with a ketohexokinase-associated disorder) can be achieved in a number of different ways. For example, delivery may be performed by contacting a cell with an iRNA of the invention either in vitro or in vivo. In vivo delivery may also be performed directly by administering a composition comprising an iRNA, e.g., a dsRNA, to a subject. Alternatively, in vivo delivery may be performed indirectly by administering one or more vectors that encode and direct the expression of the iRNA. These alternatives are discussed further below.

[0633] In general, any method of delivering a nucleic acid molecule (in vitro or in vivo) can be adapted for use with an iRNA of the invention (see e.g., Akhtar S. and Julian R L. (1992) Trends Cell. Biol. 2(5):139-144 and WO94/02595, which are incorporated herein by reference in their entireties). For in vivo delivery, factors to consider in order to deliver an iRNA molecule include, for example, biological stability of the delivered molecule, prevention of non-specific effects, and accumulation of the delivered molecule in the target tissue. RNA interference has also shown success with local delivery to the CNS by direct injection (Dorn, G., et al. (2004) Nucleic Acids 32:e49; Tan, P H., et al (2005) Gene Ther. 12:59-66; Makimura, H., et al (2002) BMC Neurosci. 3:18; Shishkina, G T., et al (2004) Neuroscience 129:521-528; Thakker, E R., et al (2004) Proc. Natl. Acad. Sci. U.S.A. 101:17270-17275; Akaneya, Y., et al (2005) J. Neurophysiol. 93:594-602). Modification of the RNA or the pharmaceutical carrier can also permit targeting of the iRNA to the target tissue and avoid undesirable off-target effects. iRNA molecules can be modified by chemical conjugation to lipophilic groups such as cholesterol to enhance cellular uptake and prevent degradation. For example, an iRNA directed against ApoB conjugated to a lipophilic cholesterol moiety was injected systemically into mice and resulted in knockdown of apoB mRNA in both the liver and jejunum (Soutschek, J., et al (2004) Nature 432:173-178).

[0634] In an alternative embodiment, the iRNA can be delivered using drug delivery systems such as a nanoparticle, a dendrimer, a polymer, liposomes, or a cationic delivery system. Positively charged cationic delivery systems facilitate binding of an iRNA molecule (negatively charged) and also enhance interactions at the negatively charged cell membrane to permit efficient uptake of an iRNA by the cell. Cationic lipids, dendrimers, or polymers can either be bound to an iRNA, or induced to form a vesicle or micelle (see e.g., Kim S H, et al (2008) Journal of Controlled Release 129(2):107-116) that encases an iRNA. The formation of vesicles or micelles further prevents degradation of the iRNA when administered systemically. Methods for making and administering cationic-iRNA complexes are well within the abilities of one skilled in the art (see e.g., Sorensen, D R, et al (2003) J. Mol. Biol 327:761-766; Verma, U N, et al (2003) Clin. Cancer Res. 9:1291-1300; Arnold, A S et al (2007) J. Hypertens. 25:197-205, which are incorporated herein by reference in their entirety). Some non-limiting examples of drug delivery systems useful for systemic delivery of iRNAs include DOTAP (Sorensen, D R., et al (2003), supra; Verma, U N, et al (2003), supra), “solid nucleic acid lipid particles” (Zimmermann, T S, et al (2006) Nature 441:111-114), cardiolipin (Chien, P Y, et al (2005) Cancer Gene Ther. 12:321-328; Pal, A, et al (2005) Int J. Oncol. 26:1087-1091), polyethyleneimine (Bonnet M E, et al (2008) Pharm. Res. August 16 Epub ahead of print; Aigner, A. (2006) J. Biomed. Biotechnol. 71659), Arg-Gly-Asp (RGD) peptides (Liu, S. (2006) Mol. Pharm. 3:472-487), and polyamidoamines (Tomalia, D A, et al (2007) Biochem. Soc. Trans. 35:61-67; Yoo, H., et al (1999) Pharm. Res. 16:1799-1804). In some embodiments, an iRNA forms a complex with cyclodextrin for systemic administration. Methods for administration and pharmaceutical compositions of iRNAs and cyclodextrins can be found in U.S. Pat. No. 7,427,605, which is herein incorporated by reference in its entirety.

[0635] A. Vector Encoded iRNAs of the Invention

[0636] iRNA targeting the ketohexokinase gene can be expressed from transcription units inserted into DNA or RNA vectors (see, e.g., Couture, A, et al., TIG. (1996), 12:5-10; Skillern, A, et al., International PCT Publication No. WO 00/22113, Conrad, International PCT Publication No. WO 00/22114, and Conrad, U.S. Pat. No. 6,054,299). Expression can be transient (on the order of hours to weeks) or sustained (weeks to months or longer), depending upon the specific construct used and the target tissue or cell type. These transgenes can be introduced as a linear construct, a circular plasmid, or a viral vector, which can be an integrating or non-integrating vector. The transgene can also be constructed to permit it to be inherited as an extrachromosomal plasmid (Gassmann, et al., Proc. Natl. Acad. Sci. USA (1995) 92:1292).

[0637] Viral vector systems which can be utilized with the methods and compositions described herein include, but are not limited to, (a) adenovirus vectors; (b) retrovirus vectors, including but not limited to lentiviral vectors, moloney murine leukemia virus, etc.; (c) adeno-associated virus vectors; (d) herpes simplex virus vectors; (e) SV 40 vectors; (f) polyoma virus vectors; (g) papilloma virus vectors; (h) picornavirus vectors; (i) pox virus vectors such as an orthopox, e.g., vaccinia virus vectors or avipox, e.g. canary pox or fowl pox; and (j) a helper-dependent or gutless adenovirus. Replication-defective viruses can also be advantageous. Different vectors will or will not become incorporated into the cells' genome. The constructs can include viral sequences for transfection, if desired. Alternatively, the construct can be incorporated into vectors capable of episomal replication, e.g. EPV and EBV vectors. Constructs for the recombinant expression of an iRNA will generally require regulatory elements, e.g., promoters, enhancers, etc., to ensure the expression of the iRNA in target cells. Other aspects to consider for vectors and constructs are known in the art.

### V. Pharmaceutical Compositions of the Invention

[0638] The present invention also includes pharmaceutical compositions and formulations which include the iRNAs of the invention. In one embodiment, provided herein are pharmaceutical compositions containing an iRNA, as described herein, and a pharmaceutically acceptable carrier. The pharmaceutical compositions containing the iRNA are useful for preventing or treating a ketohexokinase-associated disorder. Such pharmaceutical compositions are formulated based on the mode of delivery. One example is compositions that are formulated for systemic administration via parenteral delivery, e.g., by subcutaneous (SC), intramuscular (IM), or intravenous (IV) delivery. The pharmaceutical compositions of the invention may be administered in dosages sufficient to inhibit expression of a ketohexokinase gene.

[0639] In some embodiments, the pharmaceutical compositions of the invention are sterile. In another embodiment, the pharmaceutical compositions of the invention are pyrogen free.

[0640] The pharmaceutical compositions of the invention may be administered in dosages sufficient to inhibit expression of a ketohexokinase gene. In general, a suitable dose of an iRNA of the invention will be in the range of about 0.001 to about 200.0 milligrams per kilogram body weight of the recipient per day, generally in the range of about 1 to 50 mg per kilogram body weight per day. Typically, a suitable dose of an iRNA of the invention will be in the range of about 0.1 mg/kg to about 5.0 mg/kg, or about 0.3 mg/kg and about 3.0 mg/kg. A repeat-dose regimen may include administration of a therapeutic amount of iRNA on a regular basis, such as every month, once every 3-6 months, or once a year. In certain embodiments, the iRNA is administered about once per month to about once per six months.

[0641] After an initial treatment regimen, the treatments can be administered on a less frequent basis. Duration of treatment can be determined based on the severity of disease.

[0642] In other embodiments, a single dose of the pharmaceutical compositions can be long lasting, such that doses are administered at not more than 1, 2, 3, or 4 month intervals. In some embodiments of the invention, a single dose of the pharmaceutical compositions of the invention is administered about once per month. In other embodiments of the invention, a single dose of the pharmaceutical compositions of the invention is administered quarterly (i.e., about every three months). In other embodiments of the invention, a single dose of the pharmaceutical compositions of the invention is administered twice per year (i.e., about once every six months).

[0643] The skilled artisan will appreciate that certain factors can influence the dosage and timing required to effectively treat a subject, including but not limited to mutations present in the subject, previous treatments, the general health or age of the subject, and other diseases present. Moreover, treatment of a subject with a prophylactically or therapeutically effective amount, as appropriate, of a composition can include a single treatment or a series of treatments.

[0644] The iRNA can be delivered in a manner to target a particular tissue (e.g., hepatocytes).

[0645] Pharmaceutical compositions of the present invention include, but are not limited to, solutions, emulsions, and liposome-containing formulations. These compositions can be generated from a variety of components that include, but are not limited to, preformed liquids, self-emulsifying solids, and self-emulsifying semisolids. Formulations include those that target the liver.

[0646] The pharmaceutical formulations of the present invention, which can conveniently be presented in unit dosage form, can be prepared according to conventional techniques well known in the pharmaceutical industry. Such techniques include the step of bringing into association the active ingredients with the pharmaceutical carrier(s) or excipient(s). In general, the formulations are prepared by uniformly and intimately bringing into association the active ingredients with liquid carriers.

[0647] A. Additional Formulations

[0648] i. Emulsions

[0649] The compositions of the present invention can be prepared and formulated as emulsions. Emulsions are typically heterogeneous systems of one liquid dispersed in another in the form of droplets usually exceeding 0.1 μm in diameter (see e.g., Ansel's Pharmaceutical Dosage Forms and Drug Delivery Systems, Allen, LV., Popovich N G., and Ansel H C., 2004, Lippincott Williams & Wilkins (8th ed.), New York, NY; Idson, in Pharmaceutical Dosage Forms, Lieberman, Rieger and Banker (Eds.), 1988, Marcel Dekker, Inc., New York, N.Y., volume 1, p. 199; Rosoff, in Pharmaceutical Dosage Forms, Lieberman, Rieger and Banker (Eds.), 1988, Marcel Dekker, Inc., New York, N.Y., Volume 1, p. 245; Block in Pharmaceutical Dosage Forms, Lieberman, Rieger and Banker (Eds.), 1988, Marcel Dekker, Inc., New York, N.Y., volume 2, p. 335; Higuchi et al., in Remington's Pharmaceutical Sciences, Mack Publishing Co., Easton, Pa., 1985, p. 301). Emulsions are often biphasic systems comprising two immiscible liquid phases intimately mixed and dispersed with each other. In general, emulsions can be of either the water-in-oil (w/o) or the oil-in-water (o/w) variety. When an aqueous phase is finely divided into and dispersed as minute droplets into a bulk oily phase, the resulting composition is called a water-in-oil (w/o) emulsion. Alternatively, when an oily phase is finely divided into and dispersed as minute droplets into a bulk aqueous phase, the resulting composition is called an oil-in-water (o/w) emulsion. Emulsions can contain additional components in addition to the dispersed phases, and the active drug which can be present as a solution either in the aqueous phase, oily phase or itself as a separate phase. Pharmaceutical excipients such as emulsifiers, stabilizers, dyes, and anti-oxidants can also be present in emulsions as needed. Pharmaceutical emulsions can also be multiple emulsions that are comprised of more than two phases such as, for example, in the case of oil-in-water-in-oil (o/w/o) and water-in-oil-in-water (w/o/w) emulsions. Such complex formulations often provide certain advantages that simple binary emulsions do not. Multiple emulsions in which individual oil droplets of an o/w emulsion enclose small water droplets constitute a w/o/w emulsion. Likewise a system of oil droplets enclosed in globules of water stabilized in an oily continuous phase provides an o/w/o emulsion.

[0650] Emulsions are characterized by little or no thermodynamic stability. Often, the dispersed or discontinuous phase of the emulsion is well dispersed into the external or continuous phase and maintained in this form through the means of emulsifiers or the viscosity of the formulation. Other means of stabilizing emulsions entail the use of emulsifiers that can be incorporated into either phase of the emulsion. Emulsifiers can broadly be classified into four categories: synthetic surfactants, naturally occurring emulsifiers, absorption bases, and finely dispersed solids (see e.g., Ansel's Pharmaceutical Dosage Forms and Drug Delivery Systems, Allen, LV., Popovich N G., and Ansel H C., 2004, Lippincott Williams & Wilkins (8th ed.), New York, NY; Idson, in Pharmaceutical Dosage Forms, Lieberman, Rieger and Banker (Eds.), 1988, Marcel Dekker, Inc., New York, N.Y., volume 1, p. 199).

[0651] Synthetic surfactants, also known as surface active agents, have found wide applicability in the formulation of emulsions and have been reviewed in the literature (see e.g., Ansel's Pharmaceutical Dosage Forms and Drug Delivery Systems, Allen, LV., Popovich N G., and Ansel H C., 2004, Lippincott Williams & Wilkins (8th ed.), New York, NY; Rieger, in Pharmaceutical Dosage Forms, Lieberman, Rieger and Banker (Eds.), 1988, Marcel Dekker, Inc., New York, N.Y., volume 1, p. 285; Idson, in Pharmaceutical Dosage Forms, Lieberman, Rieger and Banker (Eds.), Marcel Dekker, Inc., New York, N.Y., 1988, volume 1, p. 199). Surfactants are typically amphiphilic and comprise a hydrophilic and a hydrophobic portion. The ratio of the hydrophilic to the hydrophobic nature of the surfactant has been termed the hydrophile/lipophile balance (HLB) and is a valuable tool in categorizing and selecting surfactants in the preparation of formulations. Surfactants can be classified into different classes based on the nature of the hydrophilic group: nonionic, anionic, cationic, and amphoteric (see e.g., Ansel's Pharmaceutical Dosage Forms and Drug Delivery Systems, Allen, LV., Popovich N G., and Ansel H C., 2004, Lippincott Williams & Wilkins (8th ed.), New York, NY Rieger, in Pharmaceutical Dosage Forms, Lieberman, Rieger and Banker (Eds.), 1988, Marcel Dekker, Inc., New York, N.Y., volume 1, p. 285).

[0652] A large variety of non-emulsifying materials are also included in emulsion formulations and contribute to the properties of emulsions. These include fats, oils, waxes, fatty acids, fatty alcohols, fatty esters, humectants, hydrophilic colloids, preservatives, and antioxidants (Block, in Pharmaceutical Dosage Forms, Lieberman, Rieger and Banker (Eds.), 1988, Marcel Dekker, Inc., New York, N.Y., volume 1, p. 335; Idson, in Pharmaceutical Dosage Forms, Lieberman, Rieger and Banker (Eds.), 1988, Marcel Dekker, Inc., New York, N.Y., volume 1, p. 199).

[0653] The application of emulsion formulations via dermatological, oral, and parenteral routes, and methods for their manufacture have been reviewed in the literature (see e.g., Ansel's Pharmaceutical Dosage Forms and Drug Delivery Systems, Allen, LV., Popovich N G., and Ansel H C., 2004, Lippincott Williams & Wilkins (8th ed.), New York, NY; Idson, in Pharmaceutical Dosage Forms, Lieberman, Rieger and Banker (Eds.), 1988, Marcel Dekker, Inc., New York, N.Y., volume 1, p. 199).

[0654] ii. Microemulsions

[0655] In one embodiment of the present invention, the compositions of iRNAs and nucleic acids are formulated as microemulsions. A microemulsion can be defined as a system of water, oil, and amphiphile which is a single optically isotropic and thermodynamically stable liquid solution (see e.g., Ansel's Pharmaceutical Dosage Forms and Drug Delivery Systems, Allen, LV., Popovich N G., and Ansel H C., 2004, Lippincott Williams & Wilkins (8th ed.), New York, NY; Rosoff, in Pharmaceutical Dosage Forms, Lieberman, Rieger and Banker (Eds.), 1988, Marcel Dekker, Inc., New York, N.Y., volume 1, p. 245). Typically microemulsions are systems that are prepared by first dispersing an oil in an aqueous surfactant solution and then adding a sufficient amount of a fourth component, generally an intermediate chain-length alcohol to form a transparent system. Therefore, microemulsions have also been described as thermodynamically stable, isotropically clear dispersions of two immiscible liquids that are stabilized by interfacial films of surface-active molecules (Leung and Shah, in: Controlled Release of Drugs: Polymers and Aggregate Systems, Rosoff, M., Ed., 1989, VCH Publishers, New York, pages 185-215).

[0656] iii. Microparticles

[0657] An iRNA of the invention may be incorporated into a particle, e.g., a microparticle. Microparticles can be produced by spray-drying, but may also be produced by other methods including lyophilization, evaporation, fluid bed drying, vacuum drying, or a combination of these techniques.

[0658] iv. Penetration Enhancers

[0659] In one embodiment, the present invention employs various penetration enhancers to effect the efficient delivery of nucleic acids, particularly iRNAs, to the skin of animals. Most drugs are present in solution in both ionized and nonionized forms. However, usually only lipid soluble or lipophilic drugs readily cross cell membranes. It has been discovered that even non-lipophilic drugs can cross cell membranes if the membrane to be crossed is treated with a penetration enhancer. In addition to aiding the diffusion of non-lipophilic drugs across cell membranes, penetration enhancers also enhance the permeability of lipophilic drugs.

[0660] Penetration enhancers can be classified as belonging to one of five broad categories, i.e., surfactants, fatty acids, bile salts, chelating agents, and non-chelating non-surfactants (see e.g., Malmsten, M. Surfactants and polymers in drug delivery, Informa Health Care, New York, NY, 2002; Lee et al., Critical Reviews in Therapeutic Drug Carrier Systems, 1991, p. 92). Each of the above mentioned classes of penetration enhancers and their use in manufacture of pharmaceutical compositions and delivery of pharmaceutical agents are well known in the art.

[0661] v. Excipients

[0662] In contrast to a carrier compound, a “pharmaceutical carrier” or “excipient” is a pharmaceutically acceptable solvent, suspending agent, or any other pharmacologically inert vehicle for delivering one or more nucleic acids to an animal. The excipient can be liquid or solid and is selected, with the planned manner of administration in mind, so as to provide for the desired bulk, consistency, etc., when combined with a nucleic acid and the other components of a given pharmaceutical composition. Such agent are well known in the art.

[0663] vi. Other Components

[0664] The compositions of the present invention can additionally contain other adjunct components conventionally found in pharmaceutical compositions, at their art-established usage levels. Thus, for example, the compositions can contain additional, compatible, pharmaceutically-active materials such as, for example, antipruritics, astringents, local anesthetics or anti-inflammatory agents, or can contain additional materials useful in physically formulating various dosage forms of the compositions of the present invention, such as dyes, flavoring agents, preservatives, antioxidants, opacifiers, thickening agents and stabilizers. However, such materials, when added, should not unduly interfere with the biological activities of the components of the compositions of the present invention. The formulations can be sterilized and, if desired, mixed with auxiliary agents, e.g., lubricants, preservatives, stabilizers, wetting agents, emulsifiers, salts for influencing osmotic pressure, buffers, colorings, flavorings, or aromatic substances, and the like which do not deleteriously interact with the nucleic acid(s) of the formulation.

[0665] Aqueous suspensions can contain substances which increase the viscosity of the suspension including, for example, sodium carboxymethylcellulose, sorbitol, or dextran. The suspension can also contain stabilizers.

[0666] In some embodiments, pharmaceutical compositions featured in the invention include (a) one or more iRNA and (b) one or more agents which function by a non-iRNA mechanism and which are useful in treating a ketohexokinase-associated disorder, e.g., hypertriglyceridemia.

[0667] Toxicity and prophylactic efficacy of such compounds can be determined by standard pharmaceutical procedures in cell cultures or experimental animals, e.g., for determining the LD50 (the dose lethal to 50% of the population) and the ED50 (the dose prophylactically effective in 50% of the population). The dose ratio between toxic and therapeutic effects is the therapeutic index and it can be expressed as the ratio LD50/ED50. Compounds that exhibit high therapeutic indices are preferred.

[0668] The data obtained from cell culture assays and animal studies can be used in formulating a range of dosage for use in humans. The dosage of compositions featured herein in the invention lies generally within a range of circulating concentrations that include the ED50, or an ED80 or ED90, with little or no toxicity. The dosage can vary within this range depending upon the dosage form employed and the route of administration utilized. For any compound used in the methods featured in the invention, the prophylactically effective dose can be estimated initially from cell culture assays. A dose can be formulated in animal models to achieve a circulating plasma concentration range of the compound or, when appropriate, of the polypeptide product of a target sequence (e.g., achieving a decreased concentration of the polypeptide) that includes the IC50 (i.e., the concentration of the test compound which achieves a half-maximal inhibition of symptoms) or higher levels of inhibition as determined in cell culture. Such information can be used to more accurately determine useful doses in humans. Levels in plasma can be measured, for example, by high performance liquid chromatography.

[0669] In addition to their administration, as discussed above, the iRNAs featured in the invention can be administered in combination with other known agents used for the prevention or treatment of a ketohexokinase-associated disorder, e.g., hypertriglyceridemia. In any event, the administering physician can adjust the amount and timing of iRNA administration on the basis of results observed using standard measures of efficacy known in the art or described herein.

### VI. Methods For Inhibiting Ketohexokinase Expression

[0670] The present invention also provides methods of inhibiting expression of a KHK gene in a cell. The methods include contacting a cell with an RNAi agent, e.g., double stranded RNA agent, in an amount effective to inhibit expression of KHK in the cell, thereby inhibiting expression of KHK in the cell.

[0671] Contacting of a cell with an iRNA, e.g., a double stranded RNA agent, may be done in vitro or in vivo. Contacting a cell in vivo with the iRNA includes contacting a cell or group of cells within a subject, e.g., a human subject, with the iRNA. Combinations of in vitro and in vivo methods of contacting a cell are also possible. Contacting a cell may be direct or indirect, as discussed above. Furthermore, contacting a cell may be accomplished via a targeting ligand, including any ligand described herein or known in the art. In some embodiments, the targeting ligand is a carbohydrate moiety, e.g., a GalNAKHK ligand, or any other ligand that directs the RNAi agent to a site of interest.

[0672] The term “inhibiting,” as used herein, is used interchangeably with “reducing,” “silencing,” “downregulating”, “suppressing”, and other similar terms, and includes any level of inhibition.

[0673] The phrase “inhibiting expression of a ketohexokinase” is intended to refer to inhibition of expression of any ketohexokinase gene (such as, e.g., a mouse ketohexokinase gene, a rat ketohexokinase gene, a monkey ketohexokinase gene, or a human ketohexokinase gene) as well as variants or mutants of a ketohexokinase gene. Thus, the ketohexokinase gene may be a wild-type ketohexokinase gene, a mutant ketohexokinase gene, or a transgenic ketohexokinase gene in the context of a genetically manipulated cell, group of cells, or organism.

[0674] “Inhibiting expression of a ketohexokinase gene” includes any level of inhibition of a ketohexokinase gene, e.g., at least partial suppression of the expression of a ketohexokinase gene. The expression of the ketohexokinase gene may be assessed based on the level, or the change in the level, of any variable associated with ketohexokinase gene expression, e.g., ketohexokinase mRNA level or ketohexokinase protein level. This level may be assessed in an individual cell or in a group of cells, including, for example, a sample derived from a subject. It is understood that ketohexokinase is expressed predominantly in the liver, but also in the brain, gall bladder, heart, and kidney, and is present in circulation.

[0675] Inhibition may be assessed by a decrease in an absolute or relative level of one or more variables that are associated with ketohexokinase expression compared with a control level. The control level may be any type of control level that is utilized in the art, e.g., a pre-dose baseline level, or a level determined from a similar subject, cell, or sample that is untreated or treated with a control (such as, e.g., buffer only control or inactive agent control).

[0676] In some embodiments of the methods of the invention, expression of a ketohexokinase gene is inhibited by at least 50%, 55%, 60%, 65%, 70%, 75%, 80%, 85%, 90%, or 95%, or to below the level of detection of the assay. In some embodiments, expression of a ketohexokinase gene is inhibited by at least 70%. It is further understood that inhibition of ketohexokinase expression in certain tissues, e.g., in liver, without a significant inhibition of expression in other tissues, e.g., brain, may be desirable. In some embodiments, expression level is determined using the assay method provided in Example 2 with a 10 nM siRNA concentration in the appropriate species matched cell line.

[0677] In certain embodiments, inhibition of expression in vivo is determined by knockdown of the human gene in a rodent expressing the human gene, e.g., an AAV-infected mouse expressing the human target gene (i.e., ketohexokinase), e.g., when administered as a single dose, e.g., at 3 mg/kg at the nadir of RNA expression. Knockdown of expression of an endogenous gene in a model animal system can also be determined, e.g., after administration of a single dose at, e.g., 3 mg/kg at the nadir of RNA expression. Such systems are useful when the nucleic acid sequence of the human gene and the model animal gene are sufficiently close such that the human iRNA provides effective knockdown of the model animal gene. RNA expression in liver is determined using the PCR methods provided in Example 2.

[0678] Inhibition of the expression of a ketohexokinase gene may be manifested by a reduction of the amount of mRNA expressed by a first cell or group of cells (such cells may be present, for example, in a sample derived from a subject) in which a ketohexokinase gene is transcribed and which has or have been treated (e.g., by contacting the cell or cells with an iRNA of the invention, or by administering an iRNA of the invention to a subject in which the cells are or were present) such that the expression of a ketohexokinase gene is inhibited, as compared to a second cell or group of cells substantially identical to the first cell or group of cells but which has not or have not been so treated (control cell(s) not treated with an iRNA or not treated with an iRNA targeted to the gene of interest). In some embodiments, the inhibition is assessed by the method provided in Example 2 using a 10 nM siRNA concentration in the species matched cell line and expressing the level of mRNA in treated cells as a percentage of the level of mRNA in control cells, using the following formula:

$$\frac{( mRNA in control cells ) - ( mRNA in treated cells )}{( mRNA in control cells )} 100 \%$$

[0679] In other embodiments, inhibition of the expression of a ketohexokinase gene may be assessed in terms of a reduction of a parameter that is functionally linked to ketohexokinase gene expression, e.g., ketohexokinase protein level in blood or serum from a subject. Ketohexokinase gene silencing may be determined in any cell expressing ketohexokinase, either endogenous or heterologous from an expression construct, and by any assay known in the art.

[0680] Inhibition of the expression of a ketohexokinase protein may be manifested by a reduction in the level of the ketohexokinase protein that is expressed by a cell or group of cells or in a subject sample (e.g., the level of protein in a blood sample derived from a subject). As explained above, for the assessment of mRNA suppression, the inhibition of protein expression levels in a treated cell or group of cells may similarly be expressed as a percentage of the level of protein in a control cell or group of cells, or the change in the level of protein in a subject sample, e.g., blood or serum derived therefrom.

[0681] A control cell, a group of cells, or subject sample that may be used to assess the inhibition of the expression of a ketohexokinase gene includes a cell, group of cells, or subject sample that has not yet been contacted with an RNAi agent of the invention. For example, the control cell, group of cells, or subject sample may be derived from an individual subject (e.g., a human or animal subject) prior to treatment of the subject with an RNAi agent or an appropriately matched population control.

[0682] The level of ketohexokinase mRNA that is expressed by a cell or group of cells may be determined using any method known in the art for assessing mRNA expression. In one embodiment, the level of expression of ketohexokinase in a sample is determined by detecting a transcribed polynucleotide, or portion thereof, e.g., mRNA of the ketohexokinase gene. RNA may be extracted from cells using RNA extraction techniques including, for example, using acid phenol/guanidine isothiocyanate extraction (RNAzol B; Biogenesis), RNeasy™ RNA preparation kits (Qiagen®) or PAXgene™ (PreAnalytix™, Switzerland). Typical assay formats utilizing ribonucleic acid hybridization include nuclear run-on assays, RT-PCR, RNase protection assays, northern blotting, in situ hybridization, and microarray analysis.

[0683] In some embodiments, the level of expression of ketohexokinase is determined using a nucleic acid probe. The term “probe”, as used herein, refers to any molecule that is capable of selectively binding to a specific ketohexokinase. Probes can be synthesized by one of skill in the art, or derived from appropriate biological preparations. Probes may be specifically designed to be labeled. Examples of molecules that can be utilized as probes include, but are not limited to, RNA, DNA, proteins, antibodies, and organic molecules.

[0684] Isolated mRNA can be used in hybridization or amplification assays that include, but are not limited to, Southern or northern analyses, polymerase chain reaction (PCR) analyses and probe arrays. One method for the determination of mRNA levels involves contacting the isolated mRNA with a nucleic acid molecule (probe) that can hybridize to ketohexokinase mRNA. In one embodiment, the mRNA is immobilized on a solid surface and contacted with a probe, for example by running the isolated mRNA on an agarose gel and transferring the mRNA from the gel to a membrane, such as nitrocellulose. In an alternative embodiment, the probe(s) are immobilized on a solid surface and the mRNA is contacted with the probe(s), for example, in an Affymetrix® gene chip array. A skilled artisan can readily adapt known mRNA detection methods for use in determining the level of ketohexokinase mRNA.

[0685] An alternative method for determining the level of expression of ketohexokinase in a sample involves the process of nucleic acid amplification or reverse transcriptase (to prepare cDNA) of for example mRNA in the sample, e.g., by RT-PCR (the experimental embodiment set forth in Mullis, 1987, U.S. Pat. No. 4,683,202), ligase chain reaction (Barany (1991) Proc. Nat. Acad. Sci. USA 88:189-193), self sustained sequence replication (Guatelli et al. (1990) Proc. Nat. Acad. Sci. USA 87:1874-1878), transcriptional amplification system (Kwoh et al. (1989) Proc. Natd. Acad. Sci. USA 86:1173-1177), Q-Beta Replicase (Lizardi et al. (1988) Bio/Technology 6:1197), rolling circle replication (Lizardi et al., U.S. Pat. No. 5,854,033) or any other nucleic acid amplification method, followed by the detection of the amplified molecules using techniques well known to those of skill in the art. These detection schemes are especially useful for the detection of nucleic acid molecules if such molecules are present in very low numbers. In particular aspects of the invention, the level of expression of KHK is determined by quantitative fluorogenic RT-PCR (i.e., the TaqMan™ System). In some embodiments, expression level is determined by the method provided in Example 2 using, e.g., a 10 nM siRNA concentration, in the species matched cell line.

[0686] The expression levels of ketohexokinase mRNA may be monitored using a membrane blot (such as used in hybridization analysis such as northern, Southern, dot, and the like), or microwells, sample tubes, gels, beads or fibers (or any solid support comprising bound nucleic acids). See U.S. Pat. Nos. 5,770,722, 5,874,219, 5,744,305, 5,677,195 and 5,445,934, which are incorporated herein by reference. The determination of ketohexokinase expression level may also comprise using nucleic acid probes in solution.

[0687] In some embodiments, the level of mRNA expression is assessed using branched DNA (bDNA) assays or real time PCR (qPCR). The use of these methods is described and exemplified in the Examples presented herein. In some embodiments, expression level is determined by the method provided in Example 2 using a 10 nM siRNA concentration in the species matched cell line.

[0688] The level of KHK protein expression may be determined using any method known in the art for the measurement of protein levels. Such methods include, for example, electrophoresis, capillary electrophoresis, high performance liquid chromatography (HPLC), thin layer chromatography (TLC), hyperdiffusion chromatography, fluid or gel precipitin reactions, absorption spectroscopy, a colorimetric assays, spectrophotometric assays, flow cytometry, immunodiffusion (single or double), immunoelectrophoresis, western blotting, radioimmunoassay (RIA), enzyme-linked immunosorbent assays (ELISAs), immunofluorescent assays, electrochemiluminescence assays, and the like.

[0689] In some embodiments, the efficacy of the methods of the invention are assessed by a decrease in KHK mRNA or protein level (e.g., in a liver biopsy).

[0690] In some embodiments of the methods of the invention, the iRNA is administered to a subject such that the iRNA is delivered to a specific site within the subject. The inhibition of expression of ketohexokinase may be assessed using measurements of the level or change in the level of ketohexokinase mRNA or ketohexokinase protein in a sample derived from fluid or tissue from the specific site within the subject (e.g., liver or blood).

[0691] As used herein, the terms detecting or determining a level of an analyte are understood to mean performing the steps to determine if a material, e.g., protein, RNA, is present. As used herein, methods of detecting or determining include detection or determination of an analyte level that is below the level of detection for the method used.

### VII. Prophylactic and Treatment Methods of the Invention

[0692] The present invention also provides methods of using an iRNA of the invention or a composition containing an iRNA of the invention to inhibit expression of ketohexokinase, thereby preventing or treating a ketohexokinase-associated disorder, e.g., an ketohexokinase-associated disorder is selected from the group consisting of liver disease (e.g., fatty liver, steatohepatitis, especially non-alcoholic steatohepatitis (NASH)), dyslipidemia (e.g., hyperlipidemia, high LDL cholesterol, low HDL cholesterol, hypertriglyceridemia, postprandial hypertriglyceridemia), disorders of glycemic control (e.g., insulin resistance, type 2 diabetes), cardiovascular disease (e.g., hypertension, endothelial cell dysfunction), kidney disease (e.g., acute kidney disorder, tubular dysfunction, proinflammatory changes to the proximal tubules, chronic kidney disease), metabolic syndrome, adipocyte dysfunction, visceral adipose deposition, obesity, hyperuricemia, gout, eating disorders, and excessive sugar craving. In the methods of the invention the cell may be contacted with the siRNA in vitro or in vivo, i.e., the cell may be within a subject.

[0693] A cell suitable for treatment using the methods of the invention may be any cell that expresses a ketohexokinase gene, e.g., a liver cell, a brain cell, a gall bladder cell, a heart cell, or a kidney cell, or a liver cell. A cell suitable for use in the methods of the invention may be a mammalian cell, e.g., a primate cell (such as a human cell, including human cell in a chimeric non-human animal, or a non-human primate cell, e.g., a monkey cell or a chimpanzee cell), or a non-primate cell. In certain embodiments, the cell is a human cell, e.g., a human liver cell. In the methods of the invention, ketohexokinase expression is inhibited in the cell by at least 50, 55, 60, 65, 70, 75, 80, 85, 90, or 95, or to a level below the level of detection of the assay.

[0694] The in vivo methods of the invention may include administering to a subject a composition containing an iRNA, where the iRNA includes a nucleotide sequence that is complementary to at least a part of an RNA transcript of the ketohexokinase gene of the mammal to which the RNAi agent is to be administered. The composition can be administered by any means known in the art including, but not limited to oral, intraperitoneal, or parenteral routes, including intracranial (e.g., intraventricular, intraparenchymal, and intrathecal), intravenous, intramuscular, subcutaneous, transdermal, airway (aerosol), nasal, rectal, and topical (including buccal and sublingual) administration. In certain embodiments, the compositions are administered by intravenous infusion or injection. In certain embodiments, the compositions are administered by subcutaneous injection. In certain embodiments, the compositions are administered by intramuscular injection.

[0695] In some embodiments, the administration is via a depot injection. A depot injection may release the iRNA in a consistent way over a prolonged time period. Thus, a depot injection may reduce the frequency of dosing needed to obtain a desired effect, e.g., a desired inhibition of KHK, or a therapeutic or prophylactic effect. A depot injection may also provide more consistent serum concentrations. Depot injections may include subcutaneous injections or intramuscular injections. In some embodiments, the depot injection is a subcutaneous injection.

[0696] In some embodiments, the administration is via a pump. The pump may be an external pump or a surgically implanted pump. In certain embodiments, the pump is a subcutaneously implanted osmotic pump. In other embodiments, the pump is an infusion pump. An infusion pump may be used for intravenous, subcutaneous, arterial, or epidural infusions. In some embodiments, the infusion pump is a subcutaneous infusion pump. In other embodiments, the pump is a surgically implanted pump that delivers the iRNA to the liver.

[0697] The mode of administration may be chosen based upon whether local or systemic treatment is desired and based upon the area to be treated. The route and site of administration may be chosen to enhance targeting.

[0698] In one aspect, the present invention also provides methods for inhibiting the expression of a ketohexokinase gene in a mammal. The methods include administering to the mammal a composition comprising a dsRNA that targets a ketohexokinase gene in a cell of the mammal and maintaining the mammal for a time sufficient to obtain degradation of the mRNA transcript of the ketohexokinase gene, thereby inhibiting expression of the ketohexokinase gene in the cell. Reduction in gene expression can be assessed by any methods known in the art and by methods, e.g. qRT-PCR, described herein, e.g., in Example 2. Reduction in protein production can be assessed by any methods known it the art, e.g. ELISA. In certain embodiments, a puncture liver biopsy sample serves as the tissue material for monitoring the reduction in the ketohexokinase gene or protein expression. In other embodiments, a blood sample serves as the subject sample for monitoring the reduction in the ketohexokinase protein expression.

[0699] The present invention further provides methods of treatment in a subject in need thereof, e.g., a subject diagnosed with a ketohexokinase-associated disorder, such as, liver disease (e.g., fatty liver, steatohepatitis, especiallynon-alcoholic steatohepatitis (NASH)), dyslipidemia (e.g., hyperlipidemia, high LDL cholesterol, low HDL cholesterol, hypertriglyceridemia, postprandial hypertriglyceridemia), disorders of glycemic control (e.g., insulin resistance, type 2 diabetes), cardiovascular disease (e.g., hypertension, endothelial cell dysfunction), kidney disease (e.g., acute kidney disorder, tubular dysfunction, proinflammatory changes to the proximal tubules, chronic kidney disease), metabolic syndrome, adipocyte dysfunction, visceral adipose deposition, obesity, hyperuricemia, gout, eating disorders, and excessive sugar craving.

[0700] The present invention further provides methods of prophylaxis in a subject in need thereof. The treatment methods of the invention include administering an iRNA of the invention to a subject, e.g., a subject that would benefit from a reduction of ketohexokinase expression, in a prophylactically effective amount of an iRNA targeting a ketohexokinase gene or a pharmaceutical composition comprising an iRNA targeting a ketohexokinase gene.

[0701] In one embodiment, a ketohexokinase-associated disease is selected from the group consisting of liver disease (e.g., fatty liver, steatohepatitis, especiallynon-alcoholic steatohepatitis (NASH)), dyslipidemia (e.g., hyperlipidemia, high LDL cholesterol, low HDL cholesterol, hypertriglyceridemia, postprandial hypertriglyceridemia), disorders of glycemic control (e.g., insulin resistance, type 2 diabetes), cardiovascular disease (e.g., hypertension, endothelial cell dysfunction), kidney disease (e.g., acute kidney disorder, tubular dysfunction, proinflammatory changes to the proximal tubules, chronic kidney disease), metabolic syndrome, adipocyte dysfunction, visceral adipose deposition, obesity, hyperuricemia, gout, eating disorders, and excessive sugar craving.

[0702] An iRNA of the invention may be administered as a “free iRNA.” A free iRNA is administered in the absence of a pharmaceutical composition. The naked iRNA may be in a suitable buffer solution. The buffer solution may comprise acetate, citrate, prolamine, carbonate, or phosphate, or any combination thereof. In one embodiment, the buffer solution is phosphate buffered saline (PBS). The pH and osmolarity of the buffer solution containing the iRNA can be adjusted such that it is suitable for administering to a subject.

[0703] Alternatively, an iRNA of the invention may be administered as a pharmaceutical composition, such as a dsRNA liposomal formulation.

[0704] Subjects that would benefit from an inhibition of KHK gene expression are subjects susceptible to or diagnosed with a KHK-associated disorder, such as e.g., an ketohexokinase-associated disorder is selected from the group consisting of liver disease (e.g., fatty liver, steatohepatitis, especiallynon-alcoholic steatohepatitis (NASH)), dyslipidemia (e.g., hyperlipidemia, high LDL cholesterol, low HDL cholesterol, hypertriglyceridemia, postprandial hypertriglyceridemia), disorders of glycemic control (e.g., insulin resistance, type 2 diabetes), cardiovascular disease (e.g., hypertension, endothelial cell dysfunction), kidney disease (e.g., acute kidney disorder, tubular dysfunction, proinflammatory changes to the proximal tubules, chronic kidney disease), metabolic syndrome, adipocyte dysfunction, visceral adipose deposition, obesity, hyperuricemia, gout, eating disorders, and excessive sugar craving.

[0705] In an embodiment, the method includes administering a composition featured herein such that expression of the target ketohexokinase gene is decreased, such as for about 1, 2, 3, 4, 5, 6, 1-6, 1-3, or 3-6 months per dose. In certain embodiments, the composition is administered once every 3-6 months.

[0706] In some embodiments, the iRNAs useful for the methods and compositions featured herein specifically target RNAs (primary or processed) of the target ketohexokinase gene. Compositions and methods for inhibiting the expression of these genes using iRNAs can be prepared and performed as described herein.

[0707] Administration of the iRNA according to the methods of the invention may result prevention or treatment of a ketohexokinase-associated disorder, e.g., liver disease (e.g., fatty liver, steatohepatitis, especially non-alcoholic steatohepatitis (NASH)), dyslipidemia (e.g., hyperlipidemia, high LDL cholesterol, low HDL cholesterol, hypertriglyceridemia, postprandial hypertriglyceridemia), disorders of glycemic control (e.g., insulin resistance, type 2 diabetes), cardiovascular disease (e.g., hypertension, endothelial cell dysfunction), kidney disease (e.g., acute kidney disorder, tubular dysfunction, proinflammatory changes to the proximal tubules, chronic kidney disease), metabolic syndrome, adipocyte dysfunction, visceral adipose deposition, obesity, hyperuricemia, gout, eating disorders, and excessive sugar craving.

[0708] Subjects can be administered a therapeutic amount of iRNA, such as about 0.01 mg/kg to about 200 mg/kg.

[0709] The iRNA is in some embodiments administered subcutaneously, i.e., by subcutaneous injection. One or more injections may be used to deliver the desired dose of iRNA to a subject. The injections may be repeated over a period of time.

[0710] The administration may be repeated on a regular basis. In certain embodiments, after an initial treatment regimen, the treatments can be administered on a less frequent basis. A repeat-dose regimen may include administration of a therapeutic amount of iRNA on a regular basis, such as once per month to once a year. In certain embodiments, the iRNA is administered about once per month to about once every three months, or about once every three months to about once every six months.

[0711] The invention further provides methods and uses of an iRNA agent or a pharmaceutical composition thereof for treating a subject that would benefit from reduction and/or inhibition of KHK gene expression, e.g., a subject having a KHK-associated disease, in combination with other pharmaceuticals and/or other therapeutic methods, e.g., with known pharmaceuticals and/or known therapeutic methods, such as, for example, those which are currently employed for treating these disorders.

[0712] Accordingly, in some aspects of the invention, the methods which include either a single iRNA agent of the invention, further include administering to the subject one or more additional therapeutic agents. The iRNA agent and an additional therapeutic agent and/or treatment may be administered at the same time and/or in the same combination, e.g., parenterally, or the additional therapeutic agent can be administered as part of a separate composition or at separate times and/or by another method known in the art or described herein.

[0713] In one embodiment, an iRNA agent is administered in combination with an ezetimibe/simvastatin combination (e.g., Vytorin® (Merck/Schering-Plough Pharmaceuticals)). In one embodiment, the iRNA agent is administered to the patient, and then the additional therapeutic agent is administered to the patient (or vice versa). In another embodiment, the iRNA agent and the additional therapeutic agent are administered at the same time.

[0714] The iRNA agent and an additional therapeutic agent and/or treatment may be administered at the same time and/or in the same combination, e.g., parenterally, or the additional therapeutic agent can be administered as part of a separate composition or at separate times and/or by another method known in the art or described herein.

### VIII. Diagnostic Criteria and Treatment for KHK-Associated Diseases

[0715] Diagnostic criteria, therapeutic agents, and considerations for treatment for various KHK-associated diseases are provided below.

### A. Hyperuricemia

[0716] Serum uric acid levels are not routinely obtained as clinical lab values. However, hyperuricemia (elevated uric acid) is associated with a number of diseases and conditions including gout, NAFLD, NASH, metabolic disorder, insulin resistance (not resulting from an immune response to insulin), cardiovascular disease, hypertension, and type 2 diabetes. It is expected that decreasing KHK expression can be useful in the prevention or treatment of one or more conditions associated with elevated serum uric acid levels. Further, it is expected that a subject would derive clinical benefit from normalization of serum uric acid levels towards or to a normal serum uric acid level, e.g., no more than 6.8 mg/dl, or no more than 6 mg/dl, even in the absence of overt signs or symptoms of one or more conditions associated with elevated uric acid.

[0717] Animal models of hyperuricemia include, for example, high fructose diet, e.g., in rats and mice, which can induce one or more of fat accumulation including fatty liver, insulin resistance, type 2 diabetes, obesity including visceral obesity, metabolic syndrome, decreased adiponectin secretion, reduced renal function, and inflammation (see, e.g., Johnson et al. (2013) Diabetes. 62:3307-3315). Administration of oxonic acid, a uricase inhibitor, can also be used to induce hyperuricemia (see, e.g., Mazalli et al. (2001) Hypertens. 38:1101-1106). Genetic models of hyperuricemia include the B6; 129S7-Uox^{tm1Bay}/J mouse available from Jackson Laboratory (/jaxmice.jax.org/strain/002223.html) which develops hyperuricemia, with 10-fold higher levels of serum uric acid levels.

[0718] Various treatments for hyperuricemia are known in the art. However, some of the agents can only be used in limited populations. For example, allopurinol is a xanthine oxidase inhibitor that is used to reduce serum uric acid levels for the treatment of a number of conditions, e.g., gout, cardiovascular disease including ischemia-reperfusion injury, hypertension, atherosclerosis, and stroke, and inflammatory diseases (Pacher et al., (2006) Pharma. Rev. 58:87-114). However, the use of allopurinol is contraindicated in subjects with impaired renal function, e.g., chronic kidney disease, hypothyroidism, hyperinsulinemia, or insulin resistance; or in subjects predisposed to kidney disease or impaired renal function, e.g., subjects with hypertension, metabolic disorder, diabetes, and the elderly. Further, allopurinol should not be taken by subjects taking oral coagulants or probencid as well as subjects taking diuretics, especially thiazide diuretics or other drugs that can reduce kidney function or have potential kidney toxicity.

[0719] In certain embodiments, the compositions and methods of the invention are used in combination with other compositions and methods to treat hyperuricemia, e.g., allopurinol, oxypurinol, febuxostat. In certain embodiments, the compositions and methods of the invention are used for treatment of subjects with reduced kidney function or susceptible to reduced kidney function, e.g., due to age, comorbidities, or drug interactions.

### B. Gout

[0720] Gout affects approximately 1 in 40 adults, most commonly men between 30-60 years of age. Gout less commonly affects women. Gout is one of a few types of arthritis where future damage to joints can be avoided by treatment. Gout is characterized by recurrent attacks of acute inflammatory arthritis caused by an inflammatory reaction to uric acid crystals in the joint due to hyperuricemia resulting from insufficient renal clearance of uric acid or excessive uric acid production. Fructose associated gout is sometimes associated with variants of transporters expressed in the kidney, intestine, and liver. Gout is characterized by the formation and deposition of tophi, monosodium urate (MSU) crystals, in the joints and subcutaneously. Pain associated with gout is not related to the size of the tophi, but is a result of an immune response against the MSU crystals. There is a linear inverse relation between serum uric acid and the rate of decrease in tophus size. For example, in one study of 18 patients with non-tophaceous gout, serum uric acid declined to 2.7-5.4 mg/dL (0.16-0.32 mM) in all subjects within 3 months of starting urate lowering therapy (Pascual and Sivera (2007) Ann. Rheum. Dis. 66:1056-1058). However, it took 12 months with normalized serum uric acid for MSU crystals to disappear from asymptomatic knee or first MTP joints in patients who had gout for less than 10 years, vs. 18 months in those with gout for more than 10 years. Therefore, effective treatment of gout does not require complete clearance of tophi or resolution of all symptoms, e.g., joint pain and swelling, inflammation, but simply a reduction in at least one sign or symptom of gout, e.g., reduction in severity or frequency of gout attacks, in conjunction with a reduction in serum urate levels.

[0721] Animal models of gout include oxonic acid-induced hyperuricemia (see, e.g., Jang et al. (2014) Mycobiology. 42:296-300).

[0722] Currently available treatments for gout are contraindicated or ineffective in a number of subjects. Allopurinol, a common first line treatment to reduce uric acid levels in subjects with gout, is contraindicated in a number of populations, especially those with compromised renal function, as discussed above. Further, a number of subjects fail treatment with allopurinol, e.g., subjects who suffer gout flares despite treatment, or subjects who suffer from rashes or hypersensitivity reactions associated with allopurinol.

[0723] In certain embodiments, the compositions and methods of the invention are used in combination with other agents to reduce serum uric acid. In certain embodiments, the compositions and methods of the invention are used in combination with agents for treatment of symptoms of gout, e.g., analgesic or anti-inflammatory agents, e.g., NSAIDS. In certain embodiments, the compositions and methods of the invention are used for treatment of subjects with reduced kidney function or susceptible to reduced kidney function, e.g., due to age, comorbidities, or drug interactions.

### C. Liver Disease

[0724] NAFLD is associated with hyperuricemia (Xu et al. (2015) J. Hepatol. 62:1412-1419) which, in turn, is associated with elevated fructose metabolism. The definition of nonalcoholic fatty liver disease (NAFLD) requires that (a) there is evidence of hepatic steatosis, either by imaging or by histology and (b) there are no causes for secondary hepatic fat accumulation such as significant alcohol consumption, use of steatogenic medication or hereditary disorders. In the majority of patients, NAFLD is associated with metabolic risk factors such as obesity, diabetes mellitus, and dyslipidemia. NAFLD is histologically further categorized into nonalcoholic fatty liver (NAFL) and nonalcoholic steatohepatitis (NASH). NAFL is defined as the presence of hepatic steatosis with no evidence of hepatocellular injury in the form of ballooning of the hepatocytes. NASH is defined as the presence of hepatic steatosis and inflammation with hepatocyte injury (ballooning) with or without fibrosis (Chalasani et al. (2012) Hepatol. 55:2005-2023). It is generally agreed that patients with simple steatosis have very slow, if any, histological progression, while patients with NASH can exhibit histological progression to cirrhotic-stage disease. The long term outcomes of patients with NAFLD and NASH have been reported in several studies. Their findings can be summarized as follows; (a) patients with NAFLD have increased overall mortality compared to matched control populations, (b) the most common cause of death in patients with NAFLD, NAFL, and NASH is cardiovascular disease, and (c) patients with NASH (but not NAFL) have an increased liver-related mortality rate.

[0725] Animal models of NAFLD include various high fat- or high fructose-fed animal models. Genetic models of NAFLD include the B6.129S7-Ldlr^{tm1Her}/J and the B6.129S4-Pten^{tm1Hwu}/J mice available from The Jackson Laboratory.

[0726] Treatment of NAFLD is typically to manage the conditions that resulted in development of NAFLD. For example, patients with dyslipidemia are treated with agents to normalize cholesterol or triglycerides, as needed, to treat or prevent further progression of NAFLD. Patients with type 2 diabetes are treated with agents to normalize glucose or insulin sensitivity. Lifestyle changes, e.g., changes in diet and exercise, are also used to treat NAFLD. In a mouse model of NAFLD, treatment with allopurinol both prevented the development of hepatic steatosis, but also significantly ameliorated established hepatic steatosis in mice (Xu et al., J. Hepatol. 62:1412-1419, 2015).

[0727] In certain embodiments, the compositions and methods of the invention are used in combination with other agents to reduce serum uric acid. In certain embodiments, the compositions and methods of the invention are used in combination with agents for treatment of symptoms of NAFLD. In certain embodiments, the compositions and methods of the invention are used for treatment of subjects with reduced kidney function or susceptible to reduced kidney function, e.g., due to age, comorbidities, or drug interactions.

### D. Dyslipidemia, Disorders of Glycemic Control, Metabolic Syndrome, and Obesity

[0728] Dyslipidemia (e.g., hyperlipidemia, high LDL cholesterol, low HDL cholesterol, hypertriglyceridemia, postprandial hypertriglyceridemia), disorders of glycemic control (e.g., insulin resistance, type 2 diabetes), metabolic syndrome, adipocyte dysfunction, visceral adipose deposition, obesity, and excessive sugar craving are associated with elevated fructose metabolism. Characteristics or diagnostic criteria for the conditions are provided below. Animal models of metabolic disorder and the component features include various high fat- or high fructose-fed animal models. Genetic models include leptin deficient B6.Cg-Lep^{ob}/J, commonly known as ob or ob/ob mice, which are available from The Jackson Laboratory.

[0729] Normal and abnormal fasting levels of the lipids are provided in the table below.

| Lipid | Value | | Interpretation |
|---|---|---|---|
| Total | Below 200 | mg/dL | Desirable |
| cholesterol | 200-239 | mg/dL | Borderline high |
| | 240 | mg/dL and above | High |
| LDL | Below 70 | mg/dL | Best for people who have |
| cholesterol | | | heart disease or diabetes. |
| | Below 100 | mg/dL | Optimal for people at |
| | | | risk of heart disease. |
| | 100-129 | mg/dL | Near optimal if there |
| | | | is no heart disease. |
| | | | High if there is heart |
| | | | disease. |
| | 130-159 | mg/dL | Borderline high if there |
| | | | is no heart disease. |
| | | | High if there is heart |
| | | | disease. |
| | 160-189 | mg/dL | High if there is no heart |
| | | | disease. Very high if |
| | | | there is heart disease. |
| | 190 | mg/dL and above | Very high |
| HDL | Below 40 mg/dL (men) | | Poor |
| cholesterol | Below 50 mg/dL (women) | | |
| | 50-59 | mg/dL | Moderate |
| | 60 | mg/dL and above | Normal |
| Triglycerides | Below 150 | mg/dL | Desirable |
| | 150-199 | mg/dL | Borderline high |
| | 200-499 | mg/dL | High |
| | 500 | mg/dL and above | Very High |

[0730] Postprandial hypertriglyceridemia is principally initiated by overproduction or decreased catabolism of triglyceride-rich lipoproteins (TRLs) and is a consequence of predisposing genetic variations and medical conditions such as obesity and insulin resistance.

[0731] Insulin resistance is characterized by the presence of at least one of:
[0732] 1. A fasting blood glucose level of 100-125 mg/dL taken at two different times; or
[0733] 2. An oral glucose tolerance test with a result of a glucose level of 140-199 mg/dL at 2 hours after glucose consumption.

[0734] As used herein, insulin resistance does not include a lack of response to insulin as a result of an immune response to administered insulin as often occurs in late stages of insulin dependent diabetes, especially type 1 diabetes.

[0735] Type 2 diabetes is characterized by at least one of:
[0736] 1. A fasting blood glucose level≥126 mg/dL taken at two different times;
[0737] 2. A hemoglobin A1c (A1C) test with a result of ≥6.5% or higher; or
[0738] 3. An oral glucose tolerance test with a result of a glucose level≥200 mg/dL at 2 hours after glucose consumption.

[0739] Pharmacological treatments for type 2 diabetes and insulin resistance include treatment with agents to normalize blood sugar such as metformin (e.g., glucophage, glumetza), sulfonylureas (e.g., glyburide, glipizide, glimepiride), meglitinides (e.g., repaglinide, nateglinide), thiazolidinediones (rosiglitazone, pioglitazone), DPP-4 inhibitors (sitagliptin, saxagliptin, linagliptin), GLP-1 receptor antagonists (exenatide, liraglutide), and SGLT2 inhibitors (e.g., canagliflozin, dapagliflozin).

[0740] Obesity is characterized as disease of excess body fat. Body mass index (BMI), which is calculated by dividing body weight in kilograms (kg) by height in meters (m) squared, provides a reasonable estimate of body fat for most, but not all, people. Generally, a BMI below 18.5 is characterized as underweight, 18-.5 to24.9 is normal, 25.0-29.9 is overweight, 30.0-34.9 is obese (class I), 35-39.9 is obese (class II), and 40.0 and higher is extremely obese (class III).

[0741] Methods for assessment of subcutaneous vs. visceral fat are provided, for example, in Wajchenberg (2000) Subcutaneous and visceral adipose tissue: their relation to the metabolic syndrome, Endocr Rev. 21:697-738, which is incorporated herein by reference.

[0742] Metabolic syndrome is characterized by a cluster of conditions defined as at least three of the five following metabolic risk factors:
[0743] 1. Large waistline (≥35 inches for women or ≥40 inches for men);
[0744] 2. High triglyceride level (≥150 mg/dl);
[0745] 3. Low HDL cholesterol (≤50 mg/dl for women or ≤40 mg/dl for men);
[0746] 4. Elevated blood pressure (≥130/85) or on medicine to treat high blood pressure; and
[0747] 5. High fasting blood sugar (≥100 mg/dl) or being in medicine to treat high blood sugar.

[0748] As with NAFLD, the agents for treatment of metabolic syndrome depend on the specific risk factors present, e.g., normalize lipids when lipids are abnormal, normalize glucose or insulin sensitivity when they are abnormal.

[0749] Metabolic syndrome, insulin resistance, and type 2 diabetes are often associated with decreased renal function or the potential for decreased renal function.

[0750] In certain embodiments, the compositions and methods of the invention are for use in treatment of subjects with dyslipidemia, disorders of glycemic control, metabolic syndrome, and obesity. For example, in certain embodiments, the compositions and methods of the invention are for use in subjects with metabolic syndrome, insulin resistance, or type 2 diabetes and chronic kidney disease. In certain embodiments, the compositions and methods are for use in subjects with metabolic syndrome, insulin resistance, or type 2 diabetes who are suffering from one or more of cardiovascular disease, hypothyroidism, or inflammatory disease; or elderly subjects (e.g., over 65). In certain embodiments, the compositions and methods are for use in subjects with metabolic syndrome, insulin resistance, or type 2 diabetes who are also taking a drug that can reduce kidney function as demonstrated by the drug label. For example, in certain embodiments the compositions and methods of the invention are for use in subjects with metabolic syndrome, insulin resistance, or type 2 diabetes who are being treated with oral coagulants or probencid. For example, in certain embodiments the compositions and methods of the invention are for use in subjects with metabolic syndrome, insulin resistance, or type 2 diabetes who are being treated with diuretics, especially thiazide diuretics.

[0751] In certain embodiments, the compositions and methods of the invention are used in combination with other agents to reduce serum uric acid. In certain embodiments, the compositions and methods of the invention are used in combination with agents for treatment of symptoms of metabolic syndrome, insulin resistance, or type 2 diabetes. In certain embodiments, subjects are treated with e.g., agents to decrease blood pressure, e.g., diuretics, beta-blockers, ACE inhibitors, angiotensin II receptor blockers, calcium channel blockers, alpha blockers, alpha-2 receptor antagonists, combined alpha- and beta-blockers, central agonists, peripheral adrenergic inhibitors, and blood vessel dialators; agents to decrease cholesterol, e.g., statins, selective cholesterol absorption inhibitors, resins, or lipid lowering therapies; or agents to normalize blood sugar, e.g., metformin, sulfonylureas, meglitinides, thiazolidinediones, DPP-4 inhibitors, GLP-1 receptor antagonists, and SGLT2 inhibitors.

[0752] In certain embodiments, the compositions and methods of the invention are used for treatment of subjects with reduced kidney function or susceptible to reduced kidney function, e.g., due to age, comorbidities, or drug interactions.

[0753] The iRNA and additional therapeutic agents may be administered at the same time or in the same combination, e.g., parenterally, or the additional therapeutic agent can be administered as part of a separate composition or at separate times or by another method known in the art or described herein.

### E. Cardiovascular Disease

[0754] In certain embodiments, the compositions and methods of the invention are for use in treatment of subjects with cardiovascular disease. For example, in certain embodiments, the compositions and methods of the invention are for use in subjects with cardiovascular disease and chronic kidney disease. In certain embodiments, the compositions and methods are for use in subjects with cardiovascular disease who are suffering from one or more of metabolic disorder, insulin resistance,hyperinsulinemia, diabetes, hypothyroidism, or inflammatory disease. In certain embodiments, the compositions and methods are for use in subjects with cardiovascular disease who are also taking a drug that can reduce kidney function as demonstrated by the drug label. For example, in certain embodiments the compositions and methods of the invention are for use in subjects with cardiovascular disease who are being treated with oral coagulants or probencid. For example, in certain embodiments the compositions and methods of the invention are for use in subjects with cardiovascular disease who are being treated with diuretics, especially thiazide diuretics. For example, in certain embodiments the compositions and methods of the invention are for use in subjects with cardiovascular disease who have failed treatment with allopurinol.

[0755] In certain embodiments, the compositions and methods of the invention are used in combination with other agents to reduce serum uric acid. In certain embodiments, the compositions and methods of the invention are used in combination with agents for treatment of symptoms of cardiovascular disease, e.g., agents to decrease blood pressure, e.g., diuretics, beta-blockers, ACE inhibitors, angiotensin II receptor blockers, calcium channel blockers, alpha blockers, alpha-2 receptor antagonists, combined alpha- and beta-blockers, central agonists, peripheral adrenergic inhibitors, and blood vessel dialators; or agents to decrease cholesterol, e.g., statins, selective cholesterol absorption inhibitors, resins, or lipid lowering therapies.

### F. Kidney Disease

[0756] Kidney disease includes, for example, acute kidney disorder, tubular dysfunction, proinflammatory changes to the proximal tubules, and chronic kidney disease.

[0757] Acute kidney (renal) failure occurs when the kidneys suddenly become unable to filter waste products from the blood resulting in accumulation of dangerous levels of wastes in serum and systemic chemical imbalance. Acute kidney failure can develop rapidly over a few hours or a few days, and is most common in individuals who are already hospitalized, particularly in critically ill individuals who need intensive care. Acute kidney failure can be fatal and requires intensive treatment. However, acute kidney failure may be reversible. If you're otherwise in good health, you may recover normal or nearly normal kidney function.

[0758] Chronic kidney disease, also called chronic kidney failure, describes the gradual loss of kidney function. When chronic kidney disease reaches an advanced stage, dangerous levels of fluid, electrolytes and wastes can accumulate in the body. Signs and symptoms of kidney disease may include nausea, vomiting, loss of appetite, fatigue and weakness, sleep problems, changes in urine output, decreased mental sharpness, muscle twitches and cramps, hiccups, swelling of feet and ankles, persistent itching, chest pain, if fluid builds up around the lining of the heart, shortness of breath, if fluid builds up in the lungs, high blood pressure (hypertension) that's difficult to control. Signs and symptoms of chronic kidney disease are often nonspecific and can develop slowly, and may not appear until irreversible damage has occurred.

[0759] Kidney disease is treated by removing the damaging agent or condition that is causing kidney damage, e.g. normalize blood pressure to improve kidney function, end treatment with agents that can induce kidney damage, reduce inflammation that is causing kidney damage, or by providing renal support (e.g., renal dialysis) to assist kidney function.

[0760] Renal function is typically determined using one or more routine laboratory tests, BUN (blood urea nitrogen), creatinine (blood), creatinine (urine), or creatinine clearance (see, e.g., www.nlm.nih.gov/medlineplus/ency/article/003435.htm). The tests may also be diagnostic of conditions in other organs.

[0761] Generally, a BUN level of 6 to 20 mg/dL is considered normal, although normal values may vary among different laboratories. Elevated BUN level can be indicative of kidney disease, including glomerulonephritis, pyelonephritis, and acute tubular necrosis, or kidney failure.

[0762] A normal result for blood creatinine is 0.7 to 1.3 mg/dL for men and 0.6 to 1.1 mg/dL for women. Elevated blood creatinine can be indicative of compromised kidney function due to kidney damage or failure, infection, or reduced blood flow.

[0763] Urine creatinine (24-hour sample) values can range from 500 to 2000 mg/day. Results depend on age and amount of lean body mass. Normal results are 14 to 26 mg per kg of body mass per day for men

And 11 to 20 mg per kg of body mass per day for women. Abnormal results can be indicative of kidney damage, such as damage to the tubule cells, kidney failure, decreased blood flow to the kidneys, or kidney infection (pyelonephritis).

[0764] The creatinine clearance test helps provide information regarding kidney function by comparing the creatinine level in urine with the creatinine level in blood. Clearance is often measured as milliliters per minute (ml/min). Normal values are 97 to 137 ml/min. for men and 88 to 128 ml/min. for women. Lower than normal creatinine clearance can be indicative of kidney damage, such as damage to the tubule cells, kidney failure, decreased blood flow to the kidneys, or reduced glomerular filtration in the kidneys.

[0765] In certain embodiments, the compositions and methods of the invention can be used for the treatment of kidney disease. It is expected that such agents would not cause damage to the kidney.

### VIIII. Kits

[0766] In certain aspects, the instant disclosure provides kits that include a suitable container containing a pharmaceutical formulation of a siRNA compound, e.g., a double-stranded siRNA compound, or ssiRNA compound, (e.g., a precursor, e.g., a larger siRNA compound which can be processed into a ssiRNA compound, or a DNA which encodes an siRNA compound, e.g., a double-stranded siRNA compound, or ssiRNA compound, or precursor thereof).

[0767] Such kits include one or more dsRNA agent(s) and instructions for use, e.g., instructions for administering a prophylactically or therapeutically effective amount of a dsRNA agent(s). The dsRNA agent may be in a vial or a pre-filled syringe. The kits may optionally further comprise means for administering the dsRNA agent (e.g., an injection device, such as a pre-filled syringe), or means for measuring the inhibition of KHK (e.g., means for measuring the inhibition of KHK mRNA, KHK protein, and/or KHK activity). Such means for measuring the inhibition of KHK may comprise a means for obtaining a sample from a subject, such as, e.g., a plasma sample. The kits of the invention may optionally further comprise means for determining the therapeutically effective or prophylactically effective amount.

[0768] In certain embodiments the individual components of the pharmaceutical formulation may be provided in one container, e.g., a vial or a pre-filled syringe. Alternatively, it may be desirable to provide the components of the pharmaceutical formulation separately in two or more containers, e.g., one container for a siRNA compound preparation, and at least another for a carrier compound. The kit may be packaged in a number of different configurations such as one or more containers in a single box. The different components can be combined, e.g., according to instructions provided with the kit. The components can be combined according to a method described herein, e.g., to prepare and administer a pharmaceutical composition. The kit can also include a delivery device.

[0769] This invention is further illustrated by the following examples which should not be construed as limiting. The entire contents of all references, patents and published patent applications cited throughout this application, as well as the informal Sequence Listing and Figures, are hereby incorporated herein by reference.

### EXAMPLES

### Example 1. iRNA Synthesis

### Source of Reagents

[0770] Where the source of a reagent is not specifically given herein, such reagent can be obtained from any supplier of reagents for molecular biology at a quality/purity standard for application in molecular biology.

siRNA Design

[0771] siRNAs targeting the human Ketohexokinase (KHK) gene, “ketohexokinase isoform X10” (human: NCBI refseqID XM_017004061.1; NCBI GeneID: 3795) was designed using custom R and Python scripts. The human XM_017004061 REFSEQ mRNA, version 1, has a length of 2283 bases. Detailed lists of the unmodified KHK sense and antisense strand nucleotide sequences are shown in Tables 2 and 4. Detailed lists of the modified ketohexokinase sense and antisense strand nucleotide sequences are shown in Tables 3 and 5.

[0772] It is to be understood that, throughout the application, a duplex name without a decimal is equivalent to a duplex name with a decimal which merely references the batch number of the duplex. For example, AD-959917 is equivalent to AD-959917.1.

siRNA Synthesis

[0773] siRNAs were synthesized and annealed using routine methods known in the art.

[0774] Briefly, siRNA sequences were synthesized at 1 μmol scale on a Mermade 192 synthesizer (BioAutomation) using the solid support mediated phosphoramidite chemistry. The solid support was controlled pore glass (500 A) loaded with custom GalNAc ligand or universal solid support (AM biochemical). Ancillary synthesis reagents, 2′-F and 2′-O-Methyl RNA and deoxy phosphoramidites were obtained from Thermo-Fisher (Milwaukee, WI) and Hongene (China). 2′F 2′-O-Methyl, GNA (glycol nucleic acids), 5′phosphate and other modifications were introduced using the corresponding phosphoramidites. Synthesis of 3′ GalNAc conjugated single strands was performed on a GalNAc modified CPG support. Custom CPG universal solid support was used for the synthesis of antisense single strands. Coupling time for all phosphoramidites (100 mM in acetonitrile) was 5 min employing 5-Ethylthio-1H-tetrazole (ETT) as activator (0.6 M in acetonitrile). Phosphorothioate linkages were generated using a 50 mM solution of 3-((Dimethylamino-methylidene) amino)-3H-1,2,4-dithiazole-3-thione (DDTT, obtained from Chemgenes (Wilmington, MA, USA)) in anhydrous acetonitrile/pyridine (1:1 v/v). Oxidation time was 3 minutes. All sequences were synthesized with final removal of the DMT group (“DMT off”).

[0775] Upon completion of the solid phase synthesis, oligoribonucleotides were cleaved from the solid support and deprotected in sealed 96 deep well plates using 200 μL Aqueous Methylamine reagents at 60° C. for 20 minutes. For sequences containing 2′ ribo residues (2′-OH) that are protected with a tert-butyl dimethyl silyl (TBDMS) group, a second step deprotection was performed using TEA.3HF (triethylamine trihydro fluoride) reagent. To the methylamine deprotection solution, 200 uL of dimethyl sulfoxide (DMSO) and 300 ul TEA.3HF reagent was added and the solution was incubated for additional 20 min at 60° C. At the end of cleavage and deprotection step, the synthesis plate was allowed to come to room temperature and was precipitated by addition of 1 mL of acetontile: ethanol mixture (9:1). The plates were cooled at −80 C for 2 hrs, superanatant decanted carefully with the aid of a multi channel pipette. The oligonucleotide pellet was re-suspended in 20 mM NaOAc buffer and were desalted using a 5 mL HiTrap size exclusion column (GE Healthcare) on an AKTA Purifier System equipped with an A905 autosampler and a Frac 950 fraction collector. Desalted samples were collected in 96-well plates. Samples from each sequence were analyzed by LC-MS to confirm the identity, UV (260 nm) for quantification and a selected set of samples by IEX chromatography to determine purity.

[0776] Annealing of single strands was performed on a Tecan liquid handling robot. Equimolar mixture of sense and antisense single strands were combined and annealed in 96 well plates. After combining the complementary single strands, the 96-well plate was sealed tightly and heated in an oven at 100° C. for 10 minutes and allowed to come slowly to room temperature over a period 2-3 hours. The concentration of each duplex was normalized to 10 μM in 1×PBS and then submitted for in vitro screening assays.

### Example 2. In Vitro Screening Methods

### Cell Culture and 384-Well Transfections

[0777] Hep3b cells (ATCC, Manassas, VA) were grown to near confluence at 37° C. in an atmosphere of 5% CO₂ in Eagle's Minimum Essential Medium (Gibco) supplemented with 10% FBS (ATCC) before being released from the plate by trypsinization. Transfection was carried out by adding 5 μl of Opti-MEM plus 0.1 μl of Lipofectamine RNAiMax per well (Invitrogen, Carlsbad CA. cat #13778-150) to 5 μl of each siRNA duplex to an individual well in a 384-well plate. The mixture was then incubated at room temperature for 15 minutes. Forty μl of Eagle's Minimum Essential Medium (ATCC Cat #30-2003) containing ˜5×10³ Hep3B cells were then added to the siRNA mixture. Cells were incubated for 24 hours prior to RNA purification. Single dose experiments were performed at 10 nM.

Total RNA Isolation Using DYNABEADS mRNA Isolation Kit (Invitrogen™, Part #: 610-12)

[0778] RNA was isolated using an automated protocol on a BioTek-EL406 platform using DYNABEADs (Invitrogen, cat #61012). Briefly, 70 μl of Lysis/Binding Buffer and 10 μl of lysis buffer containing 3 μl of magnetic beads were added to the plate with cells. Plates were incubated on an electromagnetic shaker for 10 minutes at room temperature and then magnetic beads were captured and the supernatant was removed. Bead-bound RNA was then washed 2 times with 150 μl Wash Buffer A and once with Wash Buffer B. Beads were then washed with 150 μl Elution Buffer, re-captured and supernatant removed.

cDNA Synthesis Using ABI High Capacity cDNA Reverse Transcription Kit (Applied Biosystems, Foster City, CA, Cat #4368813)

[0779] A master mix of 1.2 μl 10× Buffer, 0.48 μl 25× dNTPs, 1.2 μl Random primers, 0.6 μl Reverse Transcriptase, 0.6 μl RNase inhibitor and 7.92 μl of H₂O per reaction were added per well. Plates were sealed, mixed, and then incubated on an electromagnetic shaker for 10 minutes at room temperature, followed by incubation at 37° C. for 2 hours.

### Real Time PCR

[0780] Two μl of cDNA were added to a master mix containing 0.5 μl of human GAPDH TaqMan Probe (4326317E), amd 0.5 μl KHK human probe (Hs01071998_m1) and 5 μl Lightcycler 480 probe master mix (Roche Cat #04887301001) per well in a 384 well plates (Roche cat #04887301001). Real time PCR was done in a LightCycler480 Real Time PCR system (Roche). Each duplex was tested at least two times and data were normalized to cells transfected with a non-targeting control siRNA. To calculate relative fold change, real time data were analyzed using the ΔΔCt method and normalized to assays performed with cells transfected with a non-targeting control siRNA.

[0781] The results of the single dose screen of the dsRNA agents in Tables 2 are 3 are shown in Table 6 and the results of the single dose screen of the dsRNA agents Tables 4 and 5 are shown in Table 7.

TABLE 1
Abbreviations of nucleotide monomers used in nucleic acid sequence representation. It will
be understood that these monomers, when present in an oligonucleotide, are mutually linked by 5′-3′-
phosphodiester bonds.

| Abbreviation | Nucleotide(s) |
|---|---|
| A | Adenosine-3′-phosphate |
| Ab | beta-L-adenosine-3′-phosphate |
| Abs | beta-L-adenosine-3′-phosphorothioate |
| Af | 2′-fluoroadenosine-3′-phosphate |
| Afs | 2′-fluoroadenosine-3′-phosphorothioate |
| As | adenosine-3′-phosphorothioate |
| C | cytidine-3′-phosphate |
| Cb | beta-L-cytidine-3′-phosphate |
| Cbs | beta-L-cytidine-3′-phosphorothioate |
| Cf | 2′-fluorocytidine-3′-phosphate |
| Cfs | 2′-fluorocytidine-3′-phosphorothioate |
| Cs | cytidine-3′-phosphorothioate |
| G | guanosine-3′-phosphate |
| Gb | beta-L-guanosine-3′-phosphate |
| Gbs | beta-L-guanosine-3′-phosphorothioate |
| Gf | 2′-fluoroguanosine-3′-phosphate |
| Gfs | 2′-fluoroguanosine-3′-phosphorothioate |
| Gs | guanosine-3′-phosphorothioate |
| T | 5′-methyluridine-3′-phosphate |
| Tf | 2′-fluoro-5-methyluridine-3′-phosphate |
| Tfs | 2′-fluoro-5-methyluridine-3′-phosphorothioate |
| Ts | 5-methyluridine-3′-phosphorothioate |
| U | Uridine-3′-phosphate |
| Uf | 2′-fluorouridine-3′-phosphate |
| Ufs | 2′-fluorouridine-3′-phosphorothioate |
| Us | uridine-3′-phosphorothioate |
| N | any nucleotide, modified or unmodified |
| a | 2′-O-methyladenosine-3′-phosphate |
| as | 2′-O-methyladenosine-3′-phosphorothioate |
| c | 2′-O-methylcytidine-3′-phosphate |
| cs | 2′-O-methylcytidine-3′-phosphorothioate |
| g | 2′-O-methylguanosine-3′-phosphate |
| gs | 2′-O-methylguanosine-3′-phosphorothioate |
| t | 2′-O-methyl-5-methyluridine-3′-phosphate |
| ts | 2′-O-methyl-5-methyluridine-3′-phosphorothioate |
| u | 2′-O-methyluridine-3′-phosphate |
| us | 2′-O-methyluridine-3′-phosphorothioate |
| s | phosphorothioate linkage |
| L10 | N-(cholesterylcarboxamidocaproyl)-4-hydroxyprolinol (Hyp-C6-Chol) |
| L96 | N-[tris(GalNAc-alkyl)-amidodecanoyl)]-4-hydroxyprolinol |
| | (Hyp-(GalNAc-alkyl)3) |
| | [chemical structure] |
| Y34 | 2-hydroxymethyl-tetrahydrofurane-4-methoxy-3-phosphate (abasic 2′-OMe furanose) |
| Y44 | inverted abasic DNA (2-hydroxymethyl-tetrahydrofurane-5-phosphate) |
| (Agn) | Adenosine-glycol nucleic acid (GNA) |
| (Cgn) | Cytidine-glycol nucleic acid (GNA) |
| (Ggn) | Guanosine-glycol nucleic acid (GNA) |
| (Tgn) | Thymidine-glycol nucleic acid (GNA) S-Isomer |
| P | Phosphate |
| VP | Vinyl-phosphonate |
| dA | 2′-deoxyadenosine-3′-phosphate |
| dAs | 2′-deoxyadenosine-3′-phosphorothioate |
| dC | 2′-deoxycytidine-3′-phosphate |
| dCs | 2′-deoxycytidine-3′-phosphorothioate |
| dG | 2′-deoxyguanosine-3′-phosphate |
| dGs | 2′-deoxyguanosine-3′-phosphorothioate |
| dT | 2′-deoxythymidine-3′-phosphate |
| dTs | 2′-deoxythymidine-3′-phosphorothioate |
| dU | 2′-deoxyuridine |
| dUs | 2′-deoxyuridine-3′-phosphorothioate |
| (C2p) | cytidine-2′-phosphate |
| (G2p) | guanosine-2′-phosphate |
| (U2p) | uridine-2′-phosphate |
| (A2p) | adenosine-2′-phosphate |
| (Chd) | 2′-O-hexadecyl-cytidine-3′-phosphate |
| (Ahd) | 2′-O-hexadecyl-adenosine-3′-phosphate |
| (Ghd) | 2′-O-hexadecyl-guanosine-3′-phosphate |
| (Uhd) | 2′-O-hexadecyl-uridine-3′-phosphate |

TABLE 2
Unmodified Sense and Antisense Strand Sequences of Ketohexokinase dsRNA Agents

| | | SEQ | | | SEQ | |
|---|---|---|---|---|---|---|
| Duplex | Sense Sequence | ID | Position in | Antisense Sequence | ID | Position in |
| Name | 5′ to 3′ | NO: | XM_017004061.1 | 5′ to 3′ | NO: | XM_017004061.1 |
| AD-251799.1 | UUCUCUUUGCAUUCUCGAGAU | 41 | 133-153 | AUCUCGAGAAUGCAAAGAGAAAA | 110 | 131-153 |
| AD-253006.1 | CCUGCGUUGUGCAGACUCUAU | 42 | 1748-1768 | AUAGAGTCUGCACAACGCAGGGC | 111 | 1746-1768 |
| AD-251816.1 | AGAUCGCUUAGCCGCGCUUUA | 43 | 150-170 | UAAAGCGCGGCUAAGCGAUCUCG | 112 | 148-170 |
| AD-251798.1 | UUUCUCUUUGCAUUCUCGAGA | 44 | 132-152 | UCUCGAGAAUGCAAAGAGAAAAU | 113 | 130-152 |
| AD-251855.1 | GUGAGUCCAUCUGACAAGCGA | 45 | 189-209 | UCGCUUGUCAGAUGGACUCACAG | 114 | 187-209 |
| AD-252223.1 | CCAACUCCUGCACCGUUCUCU | 46 | 653-673 | AGAGAACGGUGCAGGAGUUGGAC | 115 | 651-673 |
| AD-252530.1 | CUUGUAUGGUCGUGUGAGGAA | 47 | 1017-1037 | UUCCUCACACGACCAUACAAGCC | 116 | 1015-1037 |
| AD-252341.1 | GAUCCACAUUGAGGGCCGGAA | 48 | 792-812 | UUCCGGCCCUCAAUGUGGAUCCA | 117 | 790-812 |
| AD-252484.1 | GCUGUUUGGCUACGGAGACGU | 49 | 930-950 | ACGUCUCCGUAGCCAAACAGCUG | 118 | 928-950 |
| AD-253313.1 | CUGCCAUUUAAUUAGCUGCAU | 50 | 2139-2159 | AUGCAGCUAAUUAAAUGGCAGAU | 119 | 2137-2159 |
| AD-252117.1 | GAGAAGCAGAUCCUGUGCGUU | 51 | 529-549 | AACGCACAGGAUCUGCUUCUCUU | 120 | 527-549 |
| AD-251856.1 | UGAGUCCAUCUGACAAGCGAU | 52 | 190-210 | AUCGCUTGUCAGAUGGACUCACA | 121 | 188-210 |
| AD-251808.1 | CAUUCUCGAGAUCGCUUAGCU | 53 | 142-162 | AGCUAAGCGAUCUCGAGAAUGCA | 122 | 140-162 |
| AD-251857.1 | GAGUCCAUCUGACAAGCGAGU | 54 | 191-211 | ACUCGCTUGUCAGAUGGACUCAC | 123 | 189-211 |
| AD-252378.1 | AAGAUGCUGCAGCGGAUAGAU | 55 | 829-849 | AUCUAUCCGCUGCAGCAUCUUCA | 124 | 827-849 |
| AD-251809.1 | AUUCUCGAGAUCGCUUAGCCU | 56 | 143-163 | AGGCUAAGCGAUCUCGAGAAUGC | 125 | 141-163 |
| AD-251886.1 | GCUGAGAAGUGGGAGGCGUUU | 57 | 220-240 | AAACGCCUCCCACUUCUCAGCCU | 126 | 218-240 |
| AD-252381.1 | AUGCUGCAGCGGAUAGACGCA | 58 | 832-852 | UGCGUCTAUCCGCUGCAGCAUCU | 127 | 830-852 |
| AD-251800.1 | UCUCUUUGCAUUCUCGAGAUU | 59 | 134-154 | AAUCUCGAGAAUGCAAAGAGAAA | 128 | 132-154 |
| AD-251801.1 | CUCUUUGCAUUCUCGAGAUCU | 60 | 135-155 | AGAUCUCGAGAAUGCAAAGAGAA | 129 | 133-155 |
| AD-253132.1 | UGGAGCCCACCUUGGAAUUAA | 61 | 1940-1960 | UUAAUUCCAAGGUGGGCUCCAAG | 130 | 1938-1960 |
| AD-252146.1 | CCUGGUGGACAAGUACCCUAA | 62 | 576-596 | UUAGGGTACUUGUCCACCAGGCU | 131 | 574-596 |
| AD-251811.1 | UCUCGAGAUCGCUUAGCCGCU | 63 | 145-165 | AGCGGCTAAGCGAUCUCGAGAAU | 132 | 143-165 |
| AD-251858.1 | AGUCCAUCUGACAAGCGAGGA | 64 | 192-212 | UCCUCGCUUGUCAGAUGGACUCA | 133 | 190-212 |
| AD-252483.1 | AGCUGUUUGGCUACGGAGACU | 65 | 929-949 | AGUCUCCGUAGCCAAACAGCUGG | 134 | 927-949 |
| AD-252380.1 | GAUGCUGCAGCGGAUAGACGU | 66 | 831-851 | ACGUCUAUCCGCUGCAGCAUCUU | 135 | 829-851 |
| AD-253310.1 | AAUCUGCCAUUUAAUUAGCUU | 67 | 2136-2156 | AAGCUAAUUAAAUGGCAGAUUUU | 136 | 2134-2156 |
| AD-251807.1 | GCAUUCUCGAGAUCGCUUAGU | 68 | 141-161 | ACUAAGCGAUCUCGAGAAUGCAA | 137 | 139-161 |
| AD-252531.1 | UUGUAUGGUCGUGUGAGGAAA | 69 | 1018-1038 | UUUCCUCACACGACCAUACAAGC | 138 | 1016-1038 |
| AD-252376.1 | UGAAGAUGCUGCAGCGGAUAU | 70 | 827-847 | AUAUCCGCUGCAGCAUCUUCACC | 139 | 825-847 |
| AD-252715.1 | CUGCAGGGCUUUGAUGGCAUU | 71 | 1258-1278 | AAUGCCAUCAAAGCCCUGCAGGC | 140 | 1256-1278 |
| AD-252490.1 | UGGCUACGGAGACGUGGUGUU | 72 | 936-956 | AACACCACGUCUCCGUAGCCAAA | 141 | 934-956 |
| AD-252377.1 | GAAGAUGCUGCAGCGGAUAGA | 73 | 828-848 | UCUAUCCGCUGCAGCAUCUUCAC | 142 | 826-848 |
| AD-252628.1 | AGCUGGAGACACCUUCAAUGU | 74 | 1152-1172 | ACAUUGAAGGUGUCUCCAGCUCC | 143 | 1150-1172 |
| AD-252486.1 | UGUUUGGCUACGGAGACGUGU | 75 | 932-952 | ACACGUCUCCGUAGCCAAACAGC | 144 | 930-952 |
| AD-251806.1 | UGCAUUCUCGAGAUCGCUUAU | 76 | 140-160 | AUAAGCGAUCUCGAGAAUGCAAA | 145 | 138-160 |
| AD-251817.1 | GAUCGCUUAGCCGCGCUUUAA | 77 | 151-171 | UUAAAGCGCGGCUAAGCGAUCUC | 146 | 149-171 |
| AD-253083.1 | GCCCACCAGCCUGUGAUUUGA | 78 | 1853-1873 | UCAAAUCACAGGCUGGUGGGCAG | 147 | 1851-1873 |
| AD-252498.1 | AGACGUGGUGUUUGUCAGCAA | 79 | 945-965 | UUGCUGACAAACACCACGUCUCC | 148 | 943-965 |
| AD-252379.1 | AGAUGCUGCAGCGGAUAGACU | 80 | 830-850 | AGUCUATCCGCUGCAGCAUCUUC | 149 | 828-850 |
| AD-252118.1 | AGAAGCAGAUCCUGUGCGUGU | 81 | 530-550 | ACACGCACAGGAUCUGCUUCUCU | 150 | 528-550 |
| AD-252529.1 | GCUUGUAUGGUCGUGUGAGGA | 82 | 1016-1036 | UCCUCACACGACCAUACAAGCCC | 151 | 1014-1036 |
| AD-251810.1 | UUCUCGAGAUCGCUUAGCCGU | 83 | 144-164 | ACGGCUAAGCGAUCUCGAGAAUG | 152 | 142-164 |
| AD-252314.1 | UGAGAAGGUUGAUCUGACCCA | 84 | 762-782 | UGGGUCAGAUCAACCUUCUCAAA | 153 | 760-782 |
| AD-251805.1 | UUGCAUUCUCGAGAUCGCUUA | 85 | 139-159 | UAAGCGAUCUCGAGAAUGCAAAG | 154 | 137-159 |
| AD-253008.1 | UGCGUUGUGCAGACUCUAUUU | 86 | 1750-1770 | AAAUAGAGUCUGCACAACGCAGG | 155 | 1748-1770 |
| AD-252222.1 | UCCAACUCCUGCACCGUUCUU | 87 | 652-672 | AAGAACGGUGCAGGAGUUGGACG | 156 | 650-672 |
| AD-251815.1 | GAGAUCGCUUAGCCGCGCUUU | 88 | 149-169 | AAAGCGCGGCUAAGCGAUCUCGA | 157 | 147-169 |
| AD-252485.1 | CUGUUUGGCUACGGAGACGUU | 89 | 931-951 | AACGUCTCCGUAGCCAAACAGCU | 158 | 929-951 |
| AD-252627.1 | GAGCUGGAGACACCUUCAAUU | 90 | 1151-1171 | AAUUGAAGGUGUCUCCAGCUCCC | 159 | 1149-1171 |
| AD-251885.1 | GGCUGAGAAGUGGGAGGCGUU | 91 | 219-239 | AACGCCTCCCACUUCUCAGCCUU | 160 | 217-239 |
| AD-252497.1 | GAGACGUGGUGUUUGUCAGCA | 92 | 944-964 | UGCUGACAAACACCACGUCUCCG | 161 | 942-964 |
| AD-252116.1 | AGAGAAGCAGAUCCUGUGCGU | 93 | 528-548 | ACGCACAGGAUCUGCUUCUCUUC | 162 | 526-548 |
| AD-251797.1 | UUUUCUCUUUGCAUUCUCGAU | 94 | 131-151 | AUCGAGAAUGCAAAGAGAAAAUG | 163 | 129-151 |
| AD-253133.1 | GGAGCCCACCUUGGAAUUAAU | 95 | 1941-1961 | AUUAAUTCCAAGGUGGGCUCCAA | 164 | 1939-1961 |
| AD-251804.1 | UUUGCAUUCUCGAGAUCGCUU | 96 | 138-158 | AAGCGATCUCGAGAAUGCAAAGA | 165 | 136-158 |
| AD-252600.1 | CUCCACUCGGAUGCUUUCCCU | 97 | 1105-1125 | AGGGAAAGCAUCCGAGUGGAGCA | 166 | 1103-1125 |
| AD-252528.1 | GGCUUGUAUGGUCGUGUGAGU | 98 | 1015-1035 | ACUCACACGACCAUACAAGCCCC | 167 | 1013-1035 |
| AD-252450.1 | GGCUACGGAGACGUGGUGUUU | 99 | 798-818 | AAACACCACGUCUCCGUAGCCAA | 168 | 796-818 |
| AD-252313.1 | UUGAGAAGGUUGAUCUGACCU | 100 | 761-781 | AGGUCAGAUCAACCUUCUCAAAG | 169 | 759-781 |
| AD-253134.1 | GAGCCCACCUUGGAAUUAAGU | 101 | 1942-1962 | ACUUAATUCCAAGGUGGGCUCCA | 170 | 1940-1962 |
| AD-252543.1 | CUUGUCUGUGCCUGGGCUGAU | 102 | 1048-1068 | AUCAGCCCAGGCACAGACAAGCA | 171 | 1046-1068 |
| AD-251802.1 | UCUUUGCAUUCUCGAGAUCGU | 103 | 136-156 | ACGAUCTCGAGAAUGCAAAGAGA | 172 | 134-156 |
| AD-252666.1 | GCAGGAAGCACUGAGAUUCGU | 104 | 1209-1229 | ACGAAUCUCAGUGCUUCCUGCAC | 173 | 1207-1229 |
| AD-251812.1 | CUCGAGAUCGCUUAGCCGCGU | 105 | 146-166 | ACGCGGCUAAGCGAUCUCGAGAA | 174 | 144-166 |
| AD-252632.1 | GGAGACACCUUCAAUGCCUCU | 106 | 1156-1176 | AGAGGCAUUGAAGGUGUCUCCAG | 175 | 1154-1176 |
| AD-251803.1 | CUUUGCAUUCUCGAGAUCGCU | 107 | 137-157 | AGCGAUCUCGAGAAUGCAAAGAG | 176 | 135-157 |
| AD-252339.1 | UGGAUCCACAUUGAGGGCCGU | 108 | 790-810 | ACGGCCCUCAAUGUGGAUCCACU | 177 | 788-810 |
| AD-252285.1 | CUGCCAGAUGUGUCUGCUACA | 109 | 736-756 | UGUAGCAGACACAUCUGGCAGGC | 178 | 734-756 |

TABLE 3
Modified Sense and Antisense Strand Sequences of Ketohexokinase dsRNA Agents

| | | SEQ | | SEQ | | SEQ |
|---|---|---|---|---|---|---|
| Duplex | Sense Sequence | ID | Antisense Sequence | ID | mRNA target Sequence | ID |
| Name | 5′ to 3′ | NO: | 5′ to 3′ | NO: | 5′ to 3′ | NO: |
| AD-251799.1 | ususcucuUfuGfCfAfuucucgagauL96 | 179 | asUfscucg(Agn) | 248 | UUUUCUCUUUGCAUUCUCGAGAU | 317 |
| | | | gaaugcAfaAfgagaasasa | | | |
| AD-253006.1 | cscsugcgUfuGfUfGfcagacucuauL96 | 180 | asUfsagag(Tgn) | 249 | GCCCUGCGUUGUGCAGACUCUAU | 318 |
| | | | cugcacAfaCfgcaggsgsc | | | |
| AD-251816.1 | asgsaucgCfuUfAfGfccgcgcuuuaL96 | 181 | usAfsaagc(Ggn) | 250 | CGAGAUCGCUUAGCCGCGCUUUA | 319 |
| | | | cggcuaAfgCfgaucuscsg | | | |
| AD-251798.1 | ususucucUfuUfGfCfauucucgagaL96 | 182 | usCfsucga(Ggn) | 251 | AUUUUCUCUUUGCAUUCUCGAGA | 320 |
| | | | aaugcaAfaGfagaaasasu | | | |
| AD-251855.1 | gsusgaguCfcAfUfCfugacaagcgaL96 | 183 | usCfsgcuu(Ggn) | 252 | CUGUGAGUCCAUCUGACAAGCGA | 321 |
| | | | ucagauGfgAfcucacsasg | | | |
| AD-252223.1 | cscsaacuCfcUfGfCfaccguucucuL96 | 184 | asGfsagaa(Cgn) | 253 | GUCCAACUCCUGCACCGUUCUCU | 322 |
| | | | ggugcaGfgAfguuggsasc | | | |
| AD-252530.1 | csusuguaUfgGfUfCfgugugaggaaL96 | 185 | usUfsccuc(Agn) | 254 | GGCUUGUAUGGUCGUGUGAGGAA | 323 |
| | | | cacgacCfaUfacaagscsc | | | |
| AD-252341.1 | gsasuccaCfaUfUfGfagggccggaaL96 | 186 | usUfsccgg(Cgn) | 255 | UGGAUCCACAUUGAGGGCCGGAA | 324 |
| | | | ccucaaUfgUfggaucscsa | | | |
| AD-252484.1 | gscsuguuUfgGfCfUfacggagacguL96 | 187 | asCfsgucu(Cgn) | 256 | CAGCUGUUUGGCUACGGAGACGU | 325 |
| | | | cguagcCfaAfacagcsusg | | | |
| AD-253313.1 | csusgccaUfuUfAfAfuuagcugcauL96 | 188 | asUfsgcag(Cgn) | 257 | AUCUGCCAUUUAAUUAGCUGCAU | 326 |
| | | | uaauuaAfaUfggcagsasu | | | |
| AD-252117.1 | gsasgaagCfaGfAfUfccugugcguuL96 | 189 | asAfscgca(Cgn) | 258 | AAGAGAAGCAGAUCCUGUGCGUG | 327 |
| | | | aggaucUfgCfuucucsusu | | | |
| AD-251856.1 | usgsagucCfaUfCfUfgacaagcgauL96 | 190 | asUfscgcu(Tgn) | 259 | UGUGAGUCCAUCUGACAAGCGAG | 328 |
| | | | gucagaUfgGfacucascsa | | | |
| AD-251808.1 | csasuucuCfgAfGfAfucgcuuagcuL96 | 191 | asGfscuaa(Ggn) | 260 | UGCAUUCUCGAGAUCGCUUAGCC | 329 |
| | | | cgaucuCfgAfgaaugscsa | | | |
| AD-251857.1 | gsasguccAfuCfUfGfacaagcgaguL96 | 192 | asCfsucgc(Tgn) | 261 | GUGAGUCCAUCUGACAAGCGAGG | 330 |
| | | | ugucagAfuGfgacucsasc | | | |
| AD-252378.1 | asasgaugCfuGfCfAfgcggauagauL96 | 193 | asUfscuau(Cgn) | 262 | UGAAGAUGCUGCAGCGGAUAGAC | 331 |
| | | | cgcugcAfgCfaucuuscsa | | | |
| AD-251809.1 | asusucucGfaGfAfUfcgcuuagccuL96 | 194 | asGfsgcua(Agn) | 263 | GCAUUCUCGAGAUCGCUUAGCCG | 332 |
| | | | gcgaucUfcGfagaausgsc | | | |
| AD-251886.1 | gscsugagAfaGfUfGfggaggcguuuL96 | 195 | asAfsacgc(Cgn) | 264 | AGGCUGAGAAGUGGGAGGCGUUG | 333 |
| | | | ucccacUfuCfucagcscsu | | | |
| AD-252381.1 | asusgcugCfaGfCfGfgauagacgcaL96 | 196 | usGfscguc(Tgn) | 265 | AGAUGCUGCAGCGGAUAGACGCA | 334 |
| | | | auccgcUfgCfagcauscsu | | | |
| AD-251800.1 | uscsucuuUfgCfAfUfucucgagauuL96 | 197 | asAfsucuc(Ggn) | 266 | UUUCUCUUUGCAUUCUCGAGAUC | 335 |
| | | | agaaugCfaAfagagasasa | | | |
| AD-251801.1 | csuscuuuGfcAfUfUfcucgagaucuL96 | 198 | asGfsaucu(Cgn) | 267 | UUCUCUUUGCAUUCUCGAGAUCG | 336 |
| | | | gagaauGfcAfaagagsasa | | | |
| AD-253132.1 | usgsgagcCfcAfCfCfuuggaauuaaL96 | 199 | usUfsaauu(Cgn) | 268 | CUUGGAGCCCACCUUGGAAUUAA | 337 |
| | | | caagguGfgGfcuccasasg | | | |
| AD-252146.1 | cscsugguGfgAfCfAfaguacccuaaL96 | 200 | usUfsaggg(Tgn) | 269 | AGCCUGGUGGACAAGUACCCUAA | 338 |
| | | | acuuguCfcAfccaggscsu | | | |
| AD-251811.1 | uscsucgaGfaUfCfGfcuuagccgcuL96 | 201 | asGfscggc(Tgn) | 270 | AUUCUCGAGAUCGCUUAGCCGCG | 339 |
| | | | aagcgaUfcUfcgagasasu | | | |
| AD-251858.1 | asgsuccaUfcUfGfAfcaagcgaggaL96 | 202 | usCfscucg(Cgn) | 271 | UGAGUCCAUCUGACAAGCGAGGA | 340 |
| | | | uugucaGfaUfggacuscsa | | | |
| AD-252483.1 | asgscuguUfuGfGfCfuacggagacuL96 | 203 | asGfsucuc(Cgn) | 272 | CCAGCUGUUUGGCUACGGAGACG | 341 |
| | | | guagccAfaAfcagcusgsg | | | |
| AD-252380.1 | gsasugcuGfcAfGfCfggauagacguL96 | 204 | asCfsgucu(Agn) | 273 | AAGAUGCUGCAGCGGAUAGACGC | 342 |
| | | | uccgcuGfcAfgcaucsusu | | | |
| AD-253310.1 | asasucugCfcAfUfUfuaauuagcuuL96 | 205 | asAfsgcua(Agn) | 274 | AAAAUCUGCCAUUUAAUUAGCUG | 343 |
| | | | uuaaauGfgCfagauususu | | | |
| AD-251807.1 | gscsauucUfcGfAfGfaucgcuuaguL96 | 206 | asCfsuaag(Cgn) | 275 | UUGCAUUCUCGAGAUCGCUUAGC | 344 |
| | | | gaucucGfaGfaaugcsasa | | | |
| AD-252531.1 | ususguauGfgUfCfGfugugaggaaaL96 | 207 | usUfsuccu(Cgn) | 276 | GCUUGUAUGGUCGUGUGAGGAAA | 345 |
| | | | acacgaCfcAfuacaasgsc | | | |
| AD-252376.1 | usgsaagaUfgCfUfGfcagcggauauL96 | 208 | asUfsaucc(Ggn) | 277 | GGUGAAGAUGCUGCAGCGGAUAG | 346 |
| | | | cugcagCfaUfcuucascsc | | | |
| AD-252715.1 | csusgcagGfgCfUfUfugauggcauuL96 | 209 | asAfsugcc(Agn) | 278 | GCCUGCAGGGCUUUGAUGGCAUC | 347 |
| | | | ucaaagCfcCfugcagsgsc | | | |
| AD-252490.1 | usgsgcuaCfgGfAfGfacgugguguuL96 | 210 | asAfscacc(Agn) | 279 | UUUGGCUACGGAGACGUGGUGUU | 348 |
| | | | cgucucCfgUfagccasasa | | | |
| AD-252377.1 | gsasagauGfcUfGfCfagcggauagaL96 | 211 | usCfsuauc(Cgn) | 280 | GUGAAGAUGCUGCAGCGGAUAGA | 349 |
| | | | gcugcaGfcAfucuucsasc | | | |
| AD-252628.1 | asgscuggAfgAfCfAfccuucaauguL96 | 212 | asCfsauug(Agn) | 281 | GGAGCUGGAGACACCUUCAAUGC | 350 |
| | | | agguguCfuCfcagcuscsc | | | |
| AD-252486.1 | usgsuuugGfcUfAfCfggagacguguL96 | 213 | asCfsacgu(Cgn) | 282 | GCUGUUUGGCUACGGAGACGUGG | 351 |
| | | | uccguaGfcCfaaacasgsc | | | |
| AD-251806.1 | usgscauuCfuCfGfAfgaucgcuuauL96 | 214 | asUfsaagc(Ggn) | 283 | UUUGCAUUCUCGAGAUCGCUUAG | 352 |
| | | | aucucgAfgAfaugcasasa | | | |
| AD-251817.1 | gsasucgcUfuAfGfCfcgcgcuuuaaL96 | 215 | usUfsaaag(Cgn) | 284 | GAGAUCGCUUAGCCGCGCUUUAA | 353 |
| | | | gcggcuAfaGfcgaucsusc | | | |
| AD-253083.1 | gscsccacCfaGfCfCfugugauuugaL96 | 216 | usCfsaaau(Cgn) | 285 | CUGCCCACCAGCCUGUGAUUUGA | 354 |
| | | | acaggcUfgGfugggcsasg | | | |
| AD-252498.1 | asgsacguGfgUfGfUfuugucagcaaL96 | 217 | usUfsgcug(Agn) | 286 | GGAGACGUGGUGUUUGUCAGCAA | 355 |
| | | | caaacaCfcAfcgucuscsc | | | |
| AD-252379.1 | asgsaugcUfgCfAfGfcggauagacuL96 | 218 | asGfsucua(Tgn) | 287 | GAAGAUGCUGCAGCGGAUAGACG | 356 |
| | | | ccgcugCfaGfcaucususc | | | |
| AD-252118.1 | asgsaagcAfgAfUfCfcugugcguguL96 | 219 | asCfsacgc(Agn) | 288 | AGAGAAGCAGAUCCUGUGCGUGG | 357 |
| | | | caggauCfuGfcuucuscsu | | | |
| AD-252529.1 | gscsuuguAfuGfGfUfcgugugaggaL96 | 220 | usCfscuca(Cgn) | 289 | GGGCUUGUAUGGUCGUGUGAGGA | 358 |
| | | | acgaccAfuAfcaagcscsc | | | |
| AD-251810.1 | ususcucgAfgAfUfCfgcuuagccguL96 | 221 | asCfsggcu(Agn) | 290 | CAUUCUCGAGAUCGCUUAGCCGC | 359 |
| | | | agcgauCfuCfgagaasusg | | | |
| AD-252314.1 | usgsagaaGfgUfUfGfaucugacccaL96 | 222 | usGfsgguc(Agn) | 291 | UUUGAGAAGGUUGAUCUGACCCA | 360 |
| | | | gaucaaCfcUfucucasasa | | | |
| AD-251805.1 | ususgcauUfcUfCfGfagaucgcuuaL96 | 223 | usAfsagcg(Agn) | 292 | CUUUGCAUUCUCGAGAUCGCUUA | 361 |
| | | | ucucgaGfaAfugcaasasg | | | |
| AD-253008.1 | usgscguuGfuGfCfAfgacucuauuuL96 | 224 | asAfsauag(Agn) | 293 | CCUGCGUUGUGCAGACUCUAUUC | 362 |
| | | | gucugcAfcAfacgcasgsg | | | |
| AD-252222.1 | uscscaacUfcCfUfGfcaccguucuuL96 | 225 | asAfsgaac(Ggn) | 294 | CGUCCAACUCCUGCACCGUUCUC | 363 |
| | | | gugcagGfaGfuuggascsg | | | |
| AD-251815.1 | gsasgaucGfcUfUfAfgccgcgcuuuL96 | 226 | asAfsagcg(Cgn) | 295 | UCGAGAUCGCUUAGCCGCGCUUU | 364 |
| | | | ggcuaaGfcGfaucucsgsa | | | |
| AD-252485.1 | csusguuuGfgCfUfAfcggagacguuL96 | 227 | asAfscguc(Tgn) | 296 | AGCUGUUUGGCUACGGAGACGUG | 365 |
| | | | ccguagCfcAfaacagscsu | | | |
| AD-252627.1 | gsasgcugGfaGfAfCfaccuucaauuL96 | 228 | asAfsuuga(Agn) | 297 | GGGAGCUGGAGACACCUUCAAUG | 366 |
| | | | ggugucUfcCfagcucscsc | | | |
| AD-251885.1 | gsgscugaGfaAfGfUfgggaggcguuL96 | 229 | asAfscgcc(Tgn) | 298 | AAGGCUGAGAAGUGGGAGGCGUU | 367 |
| | | | cccacuUfcUfcagccsusu | | | |
| AD-252497.1 | gsasgacgUfgGfUfGfuuugucagcaL96 | 230 | usGfscuga(Cgn) | 299 | CGGAGACGUGGUGUUUGUCAGCA | 368 |
| | | | aaacacCfaCfgucucscsg | | | |
| AD-252116.1 | asgsagaaGfcAfGfAfuccugugcguL96 | 231 | asCfsgcac(Agn) | 300 | GAAGAGAAGCAGAUCCUGUGCGU | 369 |
| | | | ggaucuGfcUfucucususc | | | |
| AD-251797.1 | ususuucuCfuUfUfGfcauucucgauL96 | 232 | asUfscgag(Agn) | 301 | CAUUUUCUCUUUGCAUUCUCGAG | 370 |
| | | | augcaaAfgAfgaaaasusg | | | |
| AD-253133.1 | gsgsagccCfaCfCfUfuggaauuaauL96 | 233 | asUfsuaau(Tgn) | 302 | UUGGAGCCCACCUUGGAAUUAAG | 371 |
| | | | ccaaggUfgGfgcuccsasa | | | |
| AD-251804.1 | ususugcaUfuCfUfCfgagaucgcuuL96 | 234 | asAfsgcga(Tgn) | 303 | UCUUUGCAUUCUCGAGAUCGCUU | 372 |
| | | | cucgagAfaUfgcaaasgsa | | | |
| AD-252600.1 | csusccacUfcGfGfAfugcuuucccuL96 | 235 | asGfsggaa(Agn) | 304 | UGCUCCACUCGGAUGCUUUCCCG | 373 |
| | | | gcauccGfaGfuggagscsa | | | |
| AD-252528.1 | gsgscuugUfaUfGfGfucgugugaguL96 | 236 | asCfsucac(Agn) | 305 | GGGGCUUGUAUGGUCGUGUGAGG | 374 |
| | | | cgaccaUfaCfaagccscsc | | | |
| AD-252450.1 | gsgscuacGfgAfGfAfcgugguguuuL96 | 237 | asAfsacac(Cgn) | 306 | UUGGCUACGGAGACGUGGUGUUU | 375 |
| | | | acgucuCfcGfuagccsasa | | | |
| AD-252313.1 | ususgagaAfgGfUfUfgaucugaccuL96 | 238 | asGfsguca(Ggn) | 307 | CUUUGAGAAGGUUGAUCUGACCC | 376 |
| | | | aucaacCfuUfcucaasasg | | | |
| AD-253134.1 | gsasgcccAfcCfUfUfggaauuaaguL96 | 239 | asCfsuuaa(Tgn) | 308 | UGGAGCCCACCUUGGAAUUAAGG | 377 |
| | | | uccaagGfuGfggcucscsa | | | |
| AD-252543.1 | csusugucUfgUfGfCfcugggcugauL96 | 240 | asUfscagc(Cgn) | 309 | UGCUUGUCUGUGCCUGGGCUGAG | 378 |
| | | | caggcaCfaGfacaagscsa | | | |
| AD-251802.1 | uscsuuugCfaUfUfCfucgagaucguL96 | 241 | asCfsgauc(Tgn) | 310 | UCUCUUUGCAUUCUCGAGAUCGC | 379 |
| | | | cgagaaUfgCfaaagasgsa | | | |
| AD-252666.1 | gscsaggaAfgCfAfCfugagauucguL96 | 242 | asCfsgaau(Cgn) | 311 | GUGCAGGAAGCACUGAGAUUCGG | 380 |
| | | | ucagugCfuUfccugcsasc | | | |
| AD-251812.1 | csuscgagAfuCfGfCfuuagccgcguL96 | 243 | asCfsgcgg(Cgn) | 312 | UUCUCGAGAUCGCUUAGCCGCGC | 381 |
| | | | uaagcgAfuCfucgagsasa | | | |
| AD-252632.1 | gsgsagacAfcCfUfUfcaaugccucuL96 | 244 | asGfsaggc(Agn) | 313 | CUGGAGACACCUUCAAUGCCUCC | 382 |
| | | | uugaagGfuGfucuccsasg | | | |
| AD-251803.1 | csusuugcAfuUfCfUfcgagaucgcuL96 | 245 | asGfscgau(Cgn) | 314 | CUCUUUGCAUUCUCGAGAUCGCU | 383 |
| | | | ucgagaAfuGfcaaagsasg | | | |
| AD-252339.1 | usgsgaucCfaCfAfUfugagggccguL96 | 246 | asCfsggcc(Cgn) | 315 | AGUGGAUCCACAUUGAGGGCCGG | 384 |
| | | | ucaaugUfgGfauccascsu | | | |
| AD-252285.1 | csusgccaGfaUfGfUfgucugcuacaL96 | 247 | usGfsuagc(Agn) | 316 | GCCUGCCAGAUGUGUCUGCUACA | 385 |
| | | | gacacaUfcUfggcagsgsc | | | |

TABLE 4
Unmodified Sense and Antisense Strand Sequences of Ketohexokinase dsRNA Agents

| | | SEQ | | | SEQ | |
|---|---|---|---|---|---|---|
| Duplex | Sense Sequence | ID | Position in | Antisense Sequence | ID | Position in |
| Name | 5′ to 3′ | NO: | XM_017004061.1 | 5′ to 3′ | NO: | XM_017004061.1 |
| AD-253536.1 | UUCUCUUUGCAUUCUCGAGAU | 41 | 133-153 | ATCUCGAGAAUGCAAAGAGAAAA | 422 | 131-153 |
| AD-254743.1 | CCUGCGUUGUGCAGACUCUAU | 42 | 1748-1768 | ATAGAGTCUGCACAACGCAGGGC | 423 | 1746-1768 |
| AD-253553.1 | AGAUCGCUTAGCCGCGCUUUA | 386 | 150-170 | UAAAGCGCGGCTAAGCGAUCUCG | 424 | 148-170 |
| AD-253535.1 | UUUCUCUUTGCAUUCUCGAGA | 387 | 132-152 | UCUCGAGAAUGCAAAGAGAAAAU | 113 | 130-152 |
| AD-253592.1 | GUGAGUCCAUCUGACAAGCGA | 45 | 189-209 | UCGCTUGUCAGAUGGACUCACAG | 425 | 187-209 |
| AD-253960.1 | CCAACUCCTGCACCGUUCUCU | 388 | 653-673 | AGAGAACGGUGCAGGAGUUGGAC | 115 | 651-673 |
| AD-254267.1 | CUUGUAUGGUCGUGUGAGGAA | 47 | 1017-1037 | UTCCTCACACGACCAUACAAGCC | 426 | 1015-1037 |
| AD-254078.1 | GAUCCACATUGAGGGCCGGAA | 389 | 792-812 | UTCCGGCCCUCAATGUGGAUCCA | 427 | 790-812 |
| AD-254216.1 | GCUGUUUGGCTACGGAGACGU | 390 | 930-950 | ACGUCUCCGUAGCCAAACAGCUG | 118 | 928-950 |
| AD-255050.1 | CUGCCAUUTAAUUAGCUGCAU | 391 | 2139-2159 | ATGCAGCUAAUTAAAUGGCAGAU | 428 | 2137-2159 |
| AD-253854.1 | GAGAAGCAGATCCUGUGCGUU | 392 | 529-549 | AACGCACAGGATCTGCUUCUCUU | 429 | 527-549 |
| AD-253593.1 | UGAGUCCATCTGACAAGCGAU | 393 | 190-210 | ATCGCUTGUCAGATGGACUCACA | 430 | 188-210 |
| AD-253545.1 | CAUUCUCGAGAUCGCUUAGCU | 53 | 142-162 | AGCUAAGCGAUCUCGAGAAUGCA | 122 | 140-162 |
| AD-253594.1 | GAGUCCAUCUGACAAGCGAGU | 54 | 191-211 | ACUCGCTUGUCAGAUGGACUCAC | 123 | 189-211 |
| AD-254115.1 | AAGAUGCUGCAGCGGAUAGAU | 55 | 829-849 | ATCUAUCCGCUGCAGCAUCUUCA | 431 | 827-849 |
| AD-253546.1 | AUUCUCGAGATCGCUUAGCCU | 394 | 143-163 | AGGCTAAGCGATCTCGAGAAUGC | 432 | 141-163 |
| AD-253623.1 | GCUGAGAAGUGGGAGGCGUUU | 57 | 220-240 | AAACGCCUCCCACTUCUCAGCCU | 433 | 218-240 |
| AD-254118.1 | AUGCUGCAGCGGAUAGACGCA | 58 | 832-852 | UGCGTCTAUCCGCTGCAGCAUCU | 434 | 830-852 |
| AD-253537.1 | UCUCUUUGCATUCUCGAGAUU | 395 | 134-154 | AAUCTCGAGAATGCAAAGAGAAA | 435 | 132-154 |
| AD-253538.1 | CUCUUUGCAUTCUCGAGAUCU | 396 | 135-155 | AGAUCUCGAGAAUGCAAAGAGAA | 129 | 133-155 |
| AD-254869.1 | UGGAGCCCACCUUGGAAUUAA | 61 | 1940-1960 | UTAATUCCAAGGUGGGCUCCAAG | 436 | 1938-1960 |
| AD-254065.1 | CCCAGUUCAAGUGGAUCCACA | 397 | 779-799 | UGUGGATCCACTUGAACUGGGUC | 437 | 777-799 |
| AD-253883.1 | CCUGGUGGACAAGUACCCUAA | 62 | 576-596 | UTAGGGTACUUGUCCACCAGGCU | 438 | 574-596 |
| AD-253548.1 | UCUCGAGATCGCUUAGCCGCU | 398 | 145-165 | AGCGGCTAAGCGATCUCGAGAAU | 439 | 143-165 |
| AD-253595.1 | AGUCCAUCTGACAAGCGAGGA | 399 | 192-212 | UCCUCGCUUGUCAGAUGGACUCA | 133 | 190-212 |
| AD-254215.1 | AGCUGUUUGGCUACGGAGACU | 65 | 929-949 | AGUCTCCGUAGCCAAACAGCUGG | 440 | 927-949 |
| AD-254117.1 | GAUGCUGCAGCGGAUAGACGU | 66 | 831-851 | ACGUCUAUCCGCUGCAGCAUCUU | 135 | 829-851 |
| AD-255047.1 | AAUCUGCCAUTUAAUUAGCUU | 400 | 2136-2156 | AAGCTAAUUAAAUGGCAGAUUUU | 441 | 2134-2156 |
| AD-253544.1 | GCAUUCUCGAGAUCGCUUAGU | 68 | 141-161 | ACUAAGCGAUCTCGAGAAUGCAA | 442 | 139-161 |
| AD-254268.1 | UUGUAUGGTCGUGUGAGGAAA | 401 | 1018-1038 | UTUCCUCACACGACCAUACAAGC | 443 | 1016-1038 |
| AD-254113.1 | UGAAGAUGCUGCAGCGGAUAU | 70 | 827-847 | ATAUCCGCUGCAGCAUCUUCACC | 444 | 825-847 |
| AD-254452.1 | CUGCAGGGCUTUGAUGGCAUU | 402 | 1258-1278 | AAUGCCAUCAAAGCCCUGCAGGC | 140 | 1256-1278 |
| AD-254222.1 | UGGCUACGGAGACGUGGUGUU | 72 | 936-956 | AACACCACGUCTCCGUAGCCAAA | 445 | 934-956 |
| AD-254114.1 | GAAGAUGCTGCAGCGGAUAGA | 403 | 828-848 | UCUATCCGCUGCAGCAUCUUCAC | 446 | 826-848 |
| AD-254364.1 | AGCUGGAGACACCUUCAAUGU | 74 | 1152-1172 | ACAUTGAAGGUGUCUCCAGCUCC | 447 | 1150-1172 |
| AD-254218.1 | UGUUUGGCTACGGAGACGUGU | 404 | 932-952 | ACACGUCUCCGTAGCCAAACAGC | 448 | 930-952 |
| AD-253543.1 | UGCAUUCUCGAGAUCGCUUAU | 76 | 140-160 | ATAAGCGAUCUCGAGAAUGCAAA | 449 | 138-160 |
| AD-253554.1 | GAUCGCUUAGCCGCGCUUUAA | 77 | 151-171 | UTAAAGCGCGGCUAAGCGAUCUC | 450 | 149-171 |
| AD-254820.1 | GCCCACCAGCCUGUGAUUUGA | 78 | 1853-1873 | UCAAAUCACAGGCTGGUGGGCAG | 451 | 1851-1873 |
| AD-254231.1 | AGACGUGGTGTUUGUCAGCAA | 405 | 945-965 | UTGCTGACAAACACCACGUCUCC | 452 | 943-965 |
| AD-254116.1 | AGAUGCUGCAGCGGAUAGACU | 80 | 830-850 | AGUCTATCCGCTGCAGCAUCUUC | 453 | 828-850 |
| AD-253855.1 | AGAAGCAGAUCCUGUGCGUGU | 81 | 530-550 | ACACGCACAGGAUCUGCUUCUCU | 150 | 528-550 |
| AD-254266.1 | GCUUGUAUGGTCGUGUGAGGA | 406 | 1016-1036 | UCCUCACACGACCAUACAAGCCC | 151 | 1014-1036 |
| AD-253547.1 | UUCUCGAGAUCGCUUAGCCGU | 83 | 144-164 | ACGGCUAAGCGAUCUCGAGAAUG | 152 | 142-164 |
| AD-254048.1 | UGAGAAGGTUGAUCUGACCCA | 407 | 762-782 | UGGGTCAGAUCAACCUUCUCAAA | 454 | 760-782 |
| AD-253542.1 | UUGCAUUCTCGAGAUCGCUUA | 408 | 139-159 | UAAGCGAUCUCGAGAAUGCAAAG | 154 | 137-159 |
| AD-254745.1 | UGCGUUGUGCAGACUCUAUUU | 86 | 1750-1770 | AAAUAGAGUCUGCACAACGCAGG | 155 | 1748-1770 |
| AD-253959.1 | UCCAACUCCUGCACCGUUCUU | 87 | 652-672 | AAGAACGGUGCAGGAGUUGGACG | 156 | 650-672 |
| AD-253552.1 | GAGAUCGCTUAGCCGCGCUUU | 409 | 149-169 | AAAGCGCGGCUAAGCGAUCUCGA | 157 | 147-169 |
| AD-254217.1 | CUGUUUGGCUACGGAGACGUU | 89 | 931-951 | AACGTCTCCGUAGCCAAACAGCU | 455 | 929-951 |
| AD-254363.1 | GAGCUGGAGACACCUUCAAUU | 90 | 1151-1171 | AAUUGAAGGUGTCTCCAGCUCCC | 456 | 1149-1171 |
| AD-253622.1 | GGCUGAGAAGTGGGAGGCGUU | 410 | 219-239 | AACGCCTCCCACUTCUCAGCCUU | 457 | 217-239 |
| AD-254230.1 | GAGACGUGGUGUUUGUCAGCA | 92 | 944-964 | UGCUGACAAACACCACGUCUCCG | 161 | 942-964 |
| AD-253853.1 | AGAGAAGCAGAUCCUGUGCGU | 93 | 528-548 | ACGCACAGGAUCUGCUUCUCUUC | 162 | 526-548 |
| AD-253534.1 | UUUUCUCUTUGCAUUCUCGAU | 411 | 131-151 | ATCGAGAAUGCAAAGAGAAAAUG | 458 | 129-151 |
| AD-254870.1 | GGAGCCCACCTUGGAAUUAAU | 412 | 1941-1961 | ATUAAUTCCAAGGTGGGCUCCAA | 459 | 1939-1961 |
| AD-253541.1 | UUUGCAUUCUCGAGAUCGCUU | 96 | 138-158 | AAGCGATCUCGAGAAUGCAAAGA | 165 | 136-158 |
| AD-254337.1 | CUCCACUCGGAUGCUUUCCCU | 97 | 1105-1125 | AGGGAAAGCAUCCGAGUGGAGCA | 166 | 1103-1125 |
| AD-254265.1 | GGCUUGUATGGUCGUGUGAGU | 413 | 1015-1035 | ACUCACACGACCATACAAGCCCC | 460 | 1013-1035 |
| AD-254223.1 | GGCUACGGAGACGUGGUGUUU | 99 | 937-957 | AAACACCACGUCUCCGUAGCCAA | 168 | 935-957 |
| AD-254047.1 | UUGAGAAGGUTGAUCUGACCU | 414 | 761-781 | AGGUCAGAUCAACCUUCUCAAAG | 169 | 759-781 |
| AD-254871.1 | GAGCCCACCUTGGAAUUAAGU | 415 | 1942-1962 | ACUUAATUCCAAGGUGGGCUCCA | 170 | 1940-1962 |
| AD-254280.1 | CUUGUCUGTGCCUGGGCUGAU | 416 | 1048-1068 | ATCAGCCCAGGCACAGACAAGCA | 461 | 1046-1068 |
| AD-253539.1 | UCUUUGCATUCUCGAGAUCGU | 417 | 136-156 | ACGATCTCGAGAATGCAAAGAGA | 462 | 134-156 |
| AD-254403.1 | GCAGGAAGCACUGAGAUUCGU | 104 | 1209-1229 | ACGAAUCUCAGTGCUUCCUGCAC | 463 | 1207-1229 |
| AD-253549.1 | CUCGAGAUCGCUUAGCCGCGU | 105 | 146-166 | ACGCGGCUAAGCGAUCUCGAGAA | 174 | 144-166 |
| AD-254368.1 | GGAGACACCUTCAAUGCCUCU | 418 | 1156-1176 | AGAGGCAUUGAAGGUGUCUCCAG | 175 | 1154-1176 |
| AD-253540.1 | CUUUGCAUTCTCGAGAUCGCU | 419 | 137-157 | AGCGAUCUCGAGAAUGCAAAGAG | 176 | 135-157 |
| AD-254076.1 | UGGAUCCACATUGAGGGCCGU | 420 | 790-810 | ACGGCCCUCAATGTGGAUCCACU | 464 | 788-810 |
| AD-254022.1 | CUGCCAGATGTGUCUGCUACA | 421 | 736-756 | UGUAGCAGACACATCUGGCAGGC | 465 | 734-756 |

TABLE 5
Modified Sense and Antisense Strand Sequences of Ketohexokinase dsRNA Agents

| | | SEQ | | SEQ | | SEQ |
|---|---|---|---|---|---|---|
| Duplex | Sense Sequence | ID | Antisense Sequence | ID | mRNA target Sequence | ID |
| Name | 5′ to 3′ | NO: | 5′ to 3′ | NO: | 5′ to 3′ | NO: |
| AD-253536.1 | ususcucuuudGcdAuucucgagauL96 | 466 | asdTscudCgdAgaau | 536 | UUUUCUCUUUGCAUUCUCGAGAU | 317 |
| | | | dGcdAaagagaasasa | | | |
| AD-254743.1 | cscsugcguudGudGcagacucuauL96 | 467 | asdTsagdAgdTcugc | 537 | GCCCUGCGUUGUGCAGACUCUAU | 318 |
| | | | dAcdAacgcaggsgsc | | | |
| AD-253553.1 | asgsaucgcudTadGccgcgcuuuaL96 | 468 | usdAsaadGcdGcggc | 538 | CGAGAUCGCUUAGCCGCGCUUUA | 319 |
| | | | dTadAgcgaucuscsg | | | |
| AD-253535.1 | ususucucuudTgdCauucucgagaL96 | 469 | usdCsucdGadGaaug | 539 | AUUUUCUCUUUGCAUUCUCGAGA | 320 |
| | | | dCadAagagaaasasu | | | |
| AD-253592.1 | gsusgaguccdAudCugacaagcgaL96 | 470 | usdCsgcdTudGucag | 540 | CUGUGAGUCCAUCUGACAAGCGA | 321 |
| | | | dAudGgacucacsasg | | | |
| AD-253960.1 | cscsaacuccdTgdCaccguucucuL96 | 471 | asdGsagdAadCggug | 541 | GUCCAACUCCUGCACCGUUCUCU | 322 |
| | | | dCadGgaguuggsasc | | | |
| AD-254267.1 | csusuguaugdGudCgugugaggaaL96 | 472 | usdTsccdTcdAcacg | 542 | GGCUUGUAUGGUCGUGUGAGGAA | 323 |
| | | | dAcdCauacaagscsc | | | |
| AD-254078.1 | gsasuccacadTudGagggccggaaL96 | 473 | usdTsccdGgdCccuc | 543 | UGGAUCCACAUUGAGGGCCGGAA | 324 |
| | | | dAadTguggaucscsa | | | |
| AD-254216.1 | gscsuguuugdGcdTacggagacguL96 | 474 | asdCsgudCudCcgua | 544 | CAGCUGUUUGGCUACGGAGACGU | 325 |
| | | | dGcdCaaacagcsusg | | | |
| AD-255050.1 | csusgccauudTadAuuagcugcauL96 | 475 | asdTsgcdAgdCuaau | 545 | AUCUGCCAUUUAAUUAGCUGCAU | 326 |
| | | | dTadAauggcagsasu | | | |
| AD-253854.1 | gsasgaagcadGadTccugugcguuL96 | 476 | asdAscgdCadCagga | 546 | AAGAGAAGCAGAUCCUGUGCGUG | 327 |
| | | | dTcdTgcuucucsusu | | | |
| AD-253593.1 | usgsaguccadTcdTgacaagcgauL96 | 477 | asdTscgdCudTguca | 547 | UGUGAGUCCAUCUGACAAGCGAG | 328 |
| | | | dGadTggacucascsa | | | |
| AD-253545.1 | csasuucucgdAgdAucgcuuagcuL96 | 478 | asdGscudAadGcgau | 548 | UGCAUUCUCGAGAUCGCUUAGCC | 329 |
| | | | dCudCgagaaugscsa | | | |
| AD-253594.1 | gsasguccaudCudGacaagcgaguL96 | 479 | asdCsucdGcdTuguc | 549 | GUGAGUCCAUCUGACAAGCGAGG | 330 |
| | | | dAgdAuggacucsasc | | | |
| AD-254115.1 | asasgaugcudGcdAgcggauagauL96 | 480 | asdTscudAudCcgcu | 550 | UGAAGAUGCUGCAGCGGAUAGAC | 331 |
| | | | dGcdAgcaucuuscsa | | | |
| AD-253546.1 | asusucucgadGadTcgcuuagccuL96 | 481 | asdGsgcdTadAgcga | 551 | GCAUUCUCGAGAUCGCUUAGCCG | 332 |
| | | | dTcdTcgagaausgsc | | | |
| AD-253623.1 | gscsugagaadGudGggaggcguuuL96 | 482 | asdAsacdGcdCuccc | 552 | AGGCUGAGAAGUGGGAGGCGUUG | 333 |
| | | | dAcdTucucagcscsu | | | |
| AD-254118.1 | asusgcugcadGcdGgauagacgcaL96 | 483 | usdGscgdTcdTaucc | 553 | AGAUGCUGCAGCGGAUAGACGCA | 334 |
| | | | dGcdTgcagcauscsu | | | |
| AD-253537.1 | uscsucuuugdCadTucucgagauuL96 | 484 | asdAsucdTcdGagaa | 554 | UUUCUCUUUGCAUUCUCGAGAUC | 335 |
| | | | dTgdCaaagagasasa | | | |
| AD-253538.1 | csuscuuugcdAudTcucgagaucuL96 | 485 | asdGsaudCudCgaga | 555 | UUCUCUUUGCAUUCUCGAGAUCG | 336 |
| | | | dAudGcaaagagsasa | | | |
| AD-254869.1 | usgsgagcccdAcdCuuggaauuaaL96 | 486 | usdTsaadTudCcaag | 556 | CUUGGAGCCCACCUUGGAAUUAA | 337 |
| | | | dGudGggcuccasasg | | | |
| AD-254065.1 | cscscaguucdAadGuggauccacaL96 | 487 | usdGsugdGadTccac | 557 | GACCCAGUUCAAGUGGAUCCACA | 606 |
| | | | dTudGaacugggsusc | | | |
| AD-253883.1 | cscsugguggdAcdAaguacccuaaL96 | 488 | usdTsagdGgdTacuu | 558 | AGCCUGGUGGACAAGUACCCUAA | 338 |
| | | | dGudCcaccaggscsu | | | |
| AD-253548.1 | uscsucgagadTcdGcuuagccgcuL96 | 489 | asdGscgdGcdTaagc | 559 | AUUCUCGAGAUCGCUUAGCCGCG | 339 |
| | | | dGadTcucgagasasu | | | |
| AD-253595.1 | asgsuccaucdTgdAcaagcgaggaL96 | 490 | usdCscudCgdCuugu | 560 | UGAGUCCAUCUGACAAGCGAGGA | 340 |
| | | | dCadGauggacuscsa | | | |
| AD-254215.1 | asgscuguuudGgdCuacggagacuL96 | 491 | asdGsucdTcdCguag | 561 | CCAGCUGUUUGGCUACGGAGACG | 341 |
| | | | dCcdAaacagcusgsg | | | |
| AD-254117.1 | gsasugcugcdAgdCggauagacguL96 | 492 | asdCsgudCudAuccg | 562 | AAGAUGCUGCAGCGGAUAGACGC | 342 |
| | | | dCudGcagcaucsusu | | | |
| AD-255047.1 | asasucugccdAudTuaauuagcuuL96 | 493 | asdAsgcdTadAuuaa | 563 | AAAAUCUGCCAUUUAAUUAGCUG | 343 |
| | | | dAudGgcagauususu | | | |
| AD-253544.1 | gscsauucucdGadGaucgcuuaguL96 | 494 | asdCsuadAgdCgauc | 564 | UUGCAUUCUCGAGAUCGCUUAGC | 344 |
| | | | dTcdGagaaugcsasa | | | |
| AD-254268.1 | ususguauggdTcdGugugaggaaaL96 | 495 | usdTsucdCudCacac | 565 | GCUUGUAUGGUCGUGUGAGGAAA | 345 |
| | | | dGadCcauacaasgsc | | | |
| AD-254113.1 | usgsaagaugdCudGcagcggauauL96 | 496 | asdTsaudCcdGcugc | 566 | GGUGAAGAUGCUGCAGCGGAUAG | 346 |
| | | | dAgdCaucuucascsc | | | |
| AD-254452.1 | csusgcagggdCudTugauggcauuL96 | 497 | asdAsugdCcdAucaa | 567 | GCCUGCAGGGCUUUGAUGGCAUC | 347 |
| | | | dAgdCccugcagsgsc | | | |
| AD-254222.1 | usgsgcuacgdGadGacgugguguuL96 | 498 | asdAscadCcdAcguc | 568 | UUUGGCUACGGAGACGUGGUGUU | 348 |
| | | | dTcdCguagccasasa | | | |
| AD-254114.1 | gsasagaugcdTgdCagcggauagaL96 | 499 | usdCsuadTcdCgcug | 569 | GUGAAGAUGCUGCAGCGGAUAGA | 349 |
| | | | dCadGcaucuucsasc | | | |
| AD-254364.1 | asgscuggagdAcdAccuucaauguL96 | 500 | asdCsaudTgdAaggu | 570 | GGAGCUGGAGACACCUUCAAUGC | 350 |
| | | | dGudCuccagcuscsc | | | |
| AD-254218.1 | usgsuuuggcdTadCggagacguguL96 | 501 | asdCsacdGudCuccg | 571 | GCUGUUUGGCUACGGAGACGUGG | 351 |
| | | | dTadGccaaacasgsc | | | |
| AD-253543.1 | usgscauucudCgdAgaucgcuuauL96 | 502 | asdTsaadGcdGaucu | 572 | UUUGCAUUCUCGAGAUCGCUUAG | 352 |
| | | | dCgdAgaaugcasasa | | | |
| AD-253554.1 | gsasucgcuudAgdCcgcgcuuuaaL96 | 503 | usdTsaadAgdCgcgg | 573 | GAGAUCGCUUAGCCGCGCUUUAA | 353 |
| | | | dCudAagcgaucsusc | | | |
| AD-254820.1 | gscsccaccadGcdCugugauuugaL96 | 504 | usdCsaadAudCacag | 574 | CUGCCCACCAGCCUGUGAUUUGA | 354 |
| | | | dGcdTggugggcsasg | | | |
| AD-254231.1 | asgsacguggdTgdTuugucagcaaL96 | 505 | usdTsgcdTgdAcaaa | 575 | GGAGACGUGGUGUUUGUCAGCAA | 355 |
| | | | dCadCcacgucuscsc | | | |
| AD-254116.1 | asgsaugcugdCadGcggauagacuL96 | 506 | asdGsucdTadTccgc | 576 | GAAGAUGCUGCAGCGGAUAGACG | 356 |
| | | | dTgdCagcaucususc | | | |
| AD-253855.1 | asgsaagcagdAudCcugugcguguL96 | 507 | asdCsacdGcdAcagg | 577 | AGAGAAGCAGAUCCUGUGCGUGG | 357 |
| | | | dAudCugcuucuscsu | | | |
| AD-254266.1 | gscsuuguaudGgdTcgugugaggaL96 | 508 | usdCscudCadCacga | 578 | GGGCUUGUAUGGUCGUGUGAGGA | 358 |
| | | | dCcdAuacaagcscsc | | | |
| AD-253547.1 | ususcucgagdAudCgcuuagccguL96 | 509 | asdCsggdCudAagcg | 579 | CAUUCUCGAGAUCGCUUAGCCGC | 359 |
| | | | dAudCucgagaasusg | | | |
| AD-254048.1 | usgsagaaggdTudGaucugacccaL96 | 510 | usdGsggdTcdAgauc | 580 | UUUGAGAAGGUUGAUCUGACCCA | 360 |
| | | | dAadCcuucucasasa | | | |
| AD-253542.1 | ususgcauucdTcdGagaucgcuuaL96 | 511 | usdAsagdCgdAucuc | 581 | CUUUGCAUUCUCGAGAUCGCUUA | 361 |
| | | | dGadGaaugcaasasg | | | |
| AD-254745.1 | usgscguugudGcdAgacucuauuuL96 | 512 | asdAsaudAgdAgucu | 582 | CCUGCGUUGUGCAGACUCUAUUC | 362 |
| | | | dGcdAcaacgcasgsg | | | |
| AD-253959.1 | uscscaacucdCudGcaccguucuuL96 | 513 | asdAsgadAcdGgugc | 583 | CGUCCAACUCCUGCACCGUUCUC | 363 |
| | | | dAgdGaguuggascsg | | | |
| AD-253552.1 | gsasgaucgcdTudAgccgcgcuuuL96 | 514 | asdAsagdCgdCggcu | 584 | UCGAGAUCGCUUAGCCGCGCUUU | 364 |
| | | | dAadGcgaucucsgsa | | | |
| AD-254217.1 | csusguuuggdCudAcggagacguuL96 | 515 | asdAscgdTcdTccgu | 585 | AGCUGUUUGGCUACGGAGACGUG | 365 |
| | | | dAgdCcaaacagscsu | | | |
| AD-254363.1 | gsasgcuggadGadCaccuucaauuL96 | 516 | asdAsuudGadAggug | 586 | GGGAGCUGGAGACACCUUCAAUG | 366 |
| | | | dTcdTccagcucscsc | | | |
| AD-253622.1 | gsgscugagadAgdTgggaggcguuL96 | 517 | asdAscgdCcdTccca | 587 | AAGGCUGAGAAGUGGGAGGCGUU | 367 |
| | | | dCudTcucagccsusu | | | |
| AD-254230.1 | gsasgacgugdGudGuuugucagcaL96 | 518 | usdGscudGadCaaac | 588 | CGGAGACGUGGUGUUUGUCAGCA | 368 |
| | | | dAcdCacgucucscsg | | | |
| AD-253853.1 | asgsagaagcdAgdAuccugugcguL96 | 519 | asdCsgcdAcdAggau | 589 | GAAGAGAAGCAGAUCCUGUGCGU | 369 |
| | | | dCudGcuucucususc | | | |
| AD-253534.1 | ususuucucudTudGcauucucgauL96 | 520 | asdTscgdAgdAaugc | 590 | CAUUUUCUCUUUGCAUUCUCGAG | 370 |
| | | | dAadAgagaaaasusg | | | |
| AD-254870.1 | gsgsagcccadCcdTuggaauuaauL96 | 521 | asdTsuadAudTccaa | 591 | UUGGAGCCCACCUUGGAAUUAAG | 371 |
| | | | dGgdTgggcuccsasa | | | |
| AD-253541.1 | ususugcauudCudCgagaucgcuuL96 | 522 | asdAsgcdGadTcucg | 592 | UCUUUGCAUUCUCGAGAUCGCUU | 372 |
| | | | dAgdAaugcaaasgsa | | | |
| AD-254337.1 | csusccacucdGgdAugcuuucccuL96 | 523 | asdGsggdAadAgcau | 593 | UGCUCCACUCGGAUGCUUUCCCG | 373 |
| | | | dCcdGaguggagscsa | | | |
| AD-254265.1 | gsgscuuguadTgdGucgugugaguL96 | 524 | asdCsucdAcdAcgac | 594 | GGGGCUUGUAUGGUCGUGUGAGG | 374 |
| | | | dCadTacaagccscsc | | | |
| AD-254223.1 | gsgscuacggdAgdAcgugguguuuL96 | 525 | asdAsacdAcdCacgu | 595 | UUGGCUACGGAGACGUGGUGUUU | 375 |
| | | | dCudCcguagccsasa | | | |
| AD-254047.1 | ususgagaagdGudTgaucugaccuL96 | 526 | asdGsgudCadGauca | 596 | CUUUGAGAAGGUUGAUCUGACCC | 376 |
| | | | dAcdCuucucaasasg | | | |
| AD-254871.1 | gsasgcccacdCudTggaauuaaguL96 | 527 | asdCsuudAadTucca | 597 | UGGAGCCCACCUUGGAAUUAAGG | 377 |
| | | | dAgdGugggcucscsa | | | |
| AD-254280.1 | csusugucugdTgdCcugggcugauL96 | 528 | asdTscadGcdCcagg | 598 | UGCUUGUCUGUGCCUGGGCUGAG | 378 |
| | | | dCadCagacaagscsa | | | |
| AD-253539.1 | uscsuuugcadTudCucgagaucguL96 | 529 | asdCsgadTcdTcgag | 599 | UCUCUUUGCAUUCUCGAGAUCGC | 379 |
| | | | dAadTgcaaagasgsa | | | |
| AD-254403.1 | gscsaggaagdCadCugagauucguL96 | 530 | asdCsgadAudCucag | 600 | GUGCAGGAAGCACUGAGAUUCGG | 380 |
| | | | dTgdCuuccugcsasc | | | |
| AD-253549.1 | csuscgagaudCgdCuuagccgcguL96 | 531 | asdCsgcdGgdCuaag | 601 | UUCUCGAGAUCGCUUAGCCGCGC | 381 |
| | | | dCgdAucucgagsasa | | | |
| AD-254368.1 | gsgsagacacdCudTcaaugccucuL96 | 532 | asdGsagdGcdAuuga | 602 | CUGGAGACACCUUCAAUGCCUCC | 382 |
| | | | dAgdGugucuccsasg | | | |
| AD-253540.1 | csusuugcaudTcdTcgagaucgcuL96 | 533 | asdGscgdAudCucga | 603 | CUCUUUGCAUUCUCGAGAUCGCU | 383 |
| | | | dGadAugcaaagsasg | | | |
| AD-254076.1 | usgsgauccadCadTugagggccguL96 | 534 | asdCsggdCcdCucaa | 604 | AGUGGAUCCACAUUGAGGGCCGG | 384 |
| | | | dTgdTggauccascsu | | | |
| AD-254022.1 | csusgccagadTgdTgucugcuacaL96 | 535 | usdGsuadGcdAgaca | 605 | GCCUGCCAGAUGUGUCUGCUACA | 385 |
| | | | dCadTcuggcagsgsc | | | |

TABLE 6
KHK In Vitro 10 nM Screens in Hep3B cells

| | Avg % KHK | |
|---|---|---|
| Duplex | mRNA Remaining | SD |
| AD-251799.1 | 39.4 | 4.3 |
| AD-253006.1 | 65.4 | 4.5 |
| AD-251816.1 | 79.6 | 20.6 |
| AD-251798.1 | 75.9 | 8.7 |
| AD-251855.1 | 62.2 | 4.6 |
| AD-252223.1 | 70.1 | 11.8 |
| AD-252530.1 | 73.4 | 23.8 |
| AD-252341.1 | 67.9 | 11.5 |
| AD-252484.1 | 94.0 | 7.9 |
| AD-253313.1 | 68.1 | 6.5 |
| AD-252117.1 | 31.8 | 5.0 |
| AD-251856.1 | 33.9 | 4.6 |
| AD-251808.1 | 46.9 | 2.1 |
| AD-251857.1 | 66.2 | 30.9 |
| AD-252378.1 | 66.9 | 10.9 |
| AD-251809.1 | 37.2 | 6.6 |
| AD-251886.1 | 71.7 | 11.2 |
| AD-252381.1 | 40.8 | 4.3 |
| AD-251800.1 | 41.9 | 3.2 |
| AD-251801.1 | 69.9 | 7.2 |
| AD-253132.1 | 86.4 | 9.3 |
| AD-252146.1 | 19.0 | 2.5 |
| AD-251811.1 | 46.7 | 5.7 |
| AD-251858.1 | 99.4 | 8.9 |
| AD-252483.1 | 29.0 | 3.2 |
| AD-252380.1 | 90.4 | 21.8 |
| AD-253310.1 | 85.1 | 19.2 |
| AD-251807.1 | 72.4 | 6.6 |
| AD-252531.1 | 13.1 | 0.8 |
| AD-252376.1 | 51.1 | 6.4 |
| AD-252715.1 | 56.5 | 6.9 |
| AD-252490.1 | 76.9 | 10.1 |
| AD-252377.1 | 76.2 | 8.2 |
| AD-252628.1 | 75.8 | 2.5 |
| AD-252486.1 | 71.8 | 4.2 |
| AD-251806.1 | 31.7 | 6.8 |
| AD-251817.1 | 29.2 | 2.7 |
| AD-253083.1 | 61.1 | 8.0 |
| AD-252498.1 | 7.3 | 2.0 |
| AD-252379.1 | 24.0 | 4.1 |
| AD-252118.1 | 51.0 | 23.3 |
| AD-252529.1 | 78.9 | 11.8 |
| AD-251810.1 | 94.3 | 3.7 |
| AD-252314.1 | 42.5 | 9.8 |
| AD-251805.1 | 49.6 | 3.2 |
| AD-253008.1 | 54.2 | 2.5 |
| AD-252222.1 | 47.4 | 9.7 |
| AD-251815.1 | 60.1 | 4.0 |
| AD-252485.1 | 52.6 | 51.1 |
| AD-252627.1 | 18.8 | 0.9 |
| AD-251885.1 | 49.6 | 5.1 |
| AD-252497.1 | 70.3 | 12.6 |
| AD-252116.1 | 49.0 | 19.2 |
| AD-251797.1 | 57.7 | 7.2 |
| AD-253133.1 | 58.5 | 8.2 |
| AD-251804.1 | 42.3 | 7.4 |
| AD-252600.1 | 59.5 | 18.8 |
| AD-252528.1 | 26.5 | 1.5 |
| AD-252450.1 | 51.0 | 9.6 |
| AD-252313.1 | 38.7 | 2.2 |
| AD-253134.1 | 85.0 | 10.9 |
| AD-252543.1 | 69.3 | 5.8 |
| AD-251802.1 | 19.4 | 2.9 |
| AD-252666.1 | 20.5 | 4.7 |
| AD-251812.1 | 23.4 | 2.8 |
| AD-252632.1 | 58.0 | 7.6 |
| AD-251803.1 | 50.3 | 10.6 |
| AD-252339.1 | 12.5 | 1.2 |
| AD-252285.1 | 12.9 | 0.8 |

TABLE 7
KHK In Vitro 10 nM Screens in Hep3B cells

| | Avg % KHK | |
|---|---|---|
| Duplex | mRNA Remaining | SD |
| AD-253536.1 | 52.7 | 13.0 |
| AD-254743.1 | 77.8 | 8.8 |
| AD-253553.1 | 76.6 | 5.6 |
| AD-253535.1 | 113.4 | 10.1 |
| AD-253592.1 | 125.7 | 25.1 |
| AD-253960.1 | 116.5 | 13.6 |
| AD-254267.1 | 64.2 | 6.3 |
| AD-254078.1 | 90.6 | 3.4 |
| AD-254216.1 | 105.3 | 9.9 |
| AD-255050.1 | 92.0 | 4.4 |
| AD-253854.1 | 42.8 | 7.6 |
| AD-253593.1 | 75.3 | 7.4 |
| AD-253545.1 | 78.6 | 5.3 |
| AD-253594.1 | 99.4 | 8.9 |
| AD-254115.1 | 97.2 | 5.4 |
| AD-253546.1 | 77.4 | 8.0 |
| AD-253623.1 | 93.9 | 3.9 |
| AD-254118.1 | 96.2 | 7.1 |
| AD-253537.1 | 47.9 | 9.7 |
| AD-253538.1 | 62.6 | 7.2 |
| AD-254869.1 | 94.1 | 4.1 |
| AD-254065.1 | 41.4 | 2.0 |
| AD-253883.1 | 73.7 | 9.2 |
| AD-253548.1 | 104.7 | 5.5 |
| AD-253595.1 | 111.9 | 11.2 |
| AD-254215.1 | 98.9 | 12.5 |
| AD-254117.1 | 112.6 | 7.9 |
| AD-255047.1 | 80.6 | 4.9 |
| AD-253544.1 | 58.0 | 5.1 |
| AD-254268.1 | 42.1 | 2.2 |
| AD-254113.1 | 70.3 | 4.0 |
| AD-254452.1 | 54.4 | 7.7 |
| AD-254222.1 | 42.2 | 2.4 |
| AD-254114.1 | 88.9 | 7.1 |
| AD-254364.1 | 46.5 | 3.4 |
| AD-254218.1 | 81.8 | 3.8 |
| AD-253543.1 | 50.0 | 4.0 |
| AD-253554.1 | 75.2 | 5.9 |
| AD-254820.1 | 77.0 | 4.6 |
| AD-254231.1 | 48.9 | 6.7 |
| AD-254116.1 | 66.8 | 3.2 |
| AD-253855.1 | 67.4 | 12.2 |
| AD-254266.1 | 36.7 | 3.6 |
| AD-253547.1 | 79.9 | 3.5 |
| AD-254048.1 | 70.3 | 7.1 |
| AD-253542.1 | 32.5 | 4.2 |
| AD-254745.1 | 71.9 | 1.9 |
| AD-253959.1 | 78.5 | 11.8 |
| AD-253552.1 | 82.6 | 5.5 |
| AD-254217.1 | 70.7 | 9.9 |
| AD-254363.1 | 47.0 | 5.8 |
| AD-253622.1 | 77.8 | 2.6 |
| AD-254230.1 | 67.3 | 2.7 |
| AD-253853.1 | 87.9 | 7.4 |
| AD-253534.1 | 78.9 | 5.8 |
| AD-254870.1 | 74.5 | 3.9 |
| AD-253541.1 | 119.8 | 78.6 |
| AD-254337.1 | 74.2 | 5.5 |
| AD-254265.1 | 15.7 | 2.2 |
| AD-254223.1 | 29.3 | 2.2 |
| AD-254047.1 | 63.6 | 6.0 |
| AD-254871.1 | 83.1 | 5.3 |
| AD-254280.1 | 85.7 | 16.3 |
| AD-253539.1 | 35.0 | 2.9 |
| AD-254403.1 | 18.1 | 1.3 |
| AD-253549.1 | 54.2 | 5.5 |
| AD-254368.1 | 91.7 | 5.8 |
| AD-253540.1 | 51.0 | 8.5 |
| AD-254076.1 | 80.8 | 8.8 |
| AD-254022.1 | 36.2 | 2.2 |

### Example 3. In Vivo Screening of dsRNA Duplexes in Mice

[0782] Duplexes of interest, identified from the above in vitro studies, were evaluated in vivo.

[0783] In particular, 6-8-week old wild-type mice (C57BL/6) were administered 100 ml of a 2×10¹¹ viral particles/ml solution of an adeno-associated virus 8 (AAV8) vector encoding human ketohexokinase (hKHK AAV) by intravenous tail vein injection at Day −14.

[0784] At day 0, mice were subcutaneously administered a single 10 mg/kg dose of a duplex of interest or PBS control (n=3/group). Table 8 provides the treatment groups and duplexes that were administered to the mice.

[0785] At day 10 post-dose, animals were sacrificed, liver samples were collected and snap-frozen in liquid nitrogen. Tissue mRNA was extracted and human KHK expression was measured by RT-QPCR, as described above. Human KHK mRNA levels were compared to the mRNA level of the housekeeping gene GAPDH. The values were then normalized to the average of PBS vehicle control group. The data were expressed as percent of baseline value, and presented as mean plus standard deviation. As shown in Table 9 and FIG. 2, human KHK mRNA levels were reduced upon treatment with a single dose of siRNA targeting hKHK at 10 mg/kg.

TABLE 8
dsRNA Duplexes for In Vivo Screening

| Duplex ID | Range in XM_017004061.1 |
|---|---|
| PBS | N/A |
| AD-252498.1 | 943-965 |
| AD-252339.1 | 788-810 |
| AD-252285.1 | 734-756 |
| AD-252531.1 | 1016-1038 |
| AD-254265.1 | 1013-1035 |
| AD-254403.1 | 1207-1229 |
| AD-252627.1 | 1149-1171 |
| AD-252146.1 | 574-596 |
| AD-252666.1 | 1207-1229 |
| AD-252379.1 | 828-850 |
| No AAV Control | N/A |

TABLE 9
KHK siRNA In Vivo Screening

| Treatment | Average Fold Change | SEM | % Knockdown |
|---|---|---|---|
| PBS | 1.02 | 0.24 | 0.00 |
| AD-252498.1 | 0.50 | 0.21 | 51.27 |
| AD-252339.1 | 0.90 | 0.25 | 12.10 |
| AD-252285.1 | 0.55 | 0.09 | 46.33 |
| AD-252531.1 | 0.88 | 0.27 | 14.06 |
| AD-254265.1 | 1.21 | 0.32 | −18.52 |
| AD-254403.1 | 0.88 | 0.19 | 13.63 |
| AD-252627.1 | 1.04 | 0.11 | −2.34 |
| AD-252146.1 | 0.63 | 0.05 | 37.77 |
| AD-252666.1 | 0.80 | 0.12 | 22.07 |
| AD-252379.1 | 1.11 | 0.03 | −8.53 |
| No AAV Control | 0.00 | 0.00 | 0.00 |

| INFORMAL SEQUENCE LISTING | |
|---|---|
| <210> 1 | |
| <211> 2283 | |
| <212> DNA | |
| <213> Homo sapiens | |
| <400> 1 | |
| ggggcggggc ggggccgccg cgaccgcggg cttcaggcag ggctgcagat gcgaggccca | 60 |
| gctgtacctc gcgtgtcccg ggtcgggagt cggagacgca ggtgcaggag agtgcggggc | 120 |
| aagtagcgca ttttctcttt gcattctcga gatcgcttag ccgcgcttta aaaaggtttg | 180 |
| catcagctgt gagtccatct gacaagcgag gaaactaagg ctgagaagtg ggaggcgttg | 240 |
| ccatctgcag gcccaggcaa cctgctacgg gaagaccggg gaccaagacc tctgggttgg | 300 |
| ctttcctaga cccgctcggg tcttcgggtg tcgcgaggaa gggccctgct cctttcgttc | 360 |
| cctgcacccc tggccgctgc aggtggctcc ctggaggagg agctcccacg cggaggagga | 420 |
| gccagggcag ctgggagcgg ggacaccatc ctcctggata agaggcagag gccgggagga | 480 |
| accccgtcag ccgggcgggc aggaagctct gggagtagcc tcatggaaga gaagcagatc | 540 |
| ctgtgcgtgg ggctagtggt gctggacgtc atcagcctgg tggacaagta ccctaaggag | 600 |
| gactcggaga taaggtgttt gtcccagaga tggcagcgcg gaggcaacgc gtccaactcc | 660 |
| tgcaccgttc tctccctgct cggagccccc tgtgccttca tgggctcaat ggctcctggc | 720 |
| catgttgctg agagcctgcc agatgtgtct gctacagact ttgagaaggt tgatctgacc | 780 |
| cagttcaagt ggatccacat tgagggccgg aacgcatcgg agcaggtgaa gatgctgcag | 840 |
| cggatagacg cacacaacac caggcagcct ccagagcaga agatccgggt gtccgtggag | 900 |
| gtggagaagc cacgagagga gctcttccag ctgtttggct acggagacgt ggtgtttgtc | 960 |
| agcaaagatg tggccaagca cttggggttc cagtcagcag aggaagcctt gaggggcttg | 1020 |
| tatggtcgtg tgaggaaagg ggctgtgctt gtctgtgcct gggctgagga gggcgccgac | 1080 |
| gccctgggcc ctgatggcaa attgctccac tcggatgctt tcccgccacc ccgcgtggtg | 1140 |
| gatacactgg gagctggaga caccttcaat gcctccgtca tcttcagcct ctcccagggg | 1200 |
| aggagcgtgc aggaagcact gagattcggg tgccaggtgg ccggcaagaa gtgtggcctg | 1260 |
| cagggctttg atggcatcgt gtgagagcag gtgccggctc ctcacacacc atggagacta | 1320 |
| ccattgcggc tgcatcgcct tctcccctcc atccagcctg gcgtccaggt tgccctgttc | 1380 |
| aggggacaga tgcaagctgt ggggaggact ctgcctgtgt cctgtgttcc ccacagggag | 1440 |
| aggctctggg gggatggctg ggggatgcag agcctcagag caaataaatc ttcctcagag | 1500 |
| ccagcttctc ctctcaatgt ctgaactgct ctggctgggc attcctgagg ctctgactct | 1560 |
| tcgatcctcc ctctttgtgt ccattcccca aattaacctc tccgcccagg cccagaggag | 1620 |
| gggctgcctg ggctagagca gcgagaagtg ccctgggctt gccaccagct ctgccctggc | 1680 |
| tggggaggac actcggtgcc ccacacccag tgaacctgcc aaagaaaccg tgagagctct | 1740 |
| tcggggccct gcgttgtgca gactctattc ccacagctca gaagctggga gtccacaccg | 1800 |
| ctgagctgaa ctgacaggcc agtggggggc aggggtgcgc ctcctctgcc ctgcccacca | 1860 |
| gcctgtgatt tgatggggtc ttcattgtcc agaaatacct cctcccgctg actgccccag | 1920 |
| agcctgaaag tctcaccctt ggagcccacc ttggaattaa gggcgtgcct cagccacaaa | 1980 |
| tgtgacccag gatacagagt gttgctgtcc tcagggaggt ccgatctgga acacatattg | 2040 |
| gaattggggc caactccaat atagggtggg taaggcctta taatgtaaag agcatataat | 2100 |
| gtaaagggct ttagagtgag acagacctgg attaaaatct gccatttaat tagctgcata | 2160 |
| tcaccttagg gtacagcact taacgcaatc tgcctcaatt tcttcatctg tcaaatggaa | 2220 |
| ccaattctgc ttggctacag aattattgtg aggataaaat catatataaa atgcccagca | 2280 |
| tga | 2283 |
| <210> 2 | |
| <211> 2283 | |
| <212> DNA | |
| <213> Homo sapiens | |
| <400> 2 | |
| tcatgctggg cattttatat atgattttat cctcacaata attctgtagc caagcagaat | 60 |
| tggttccatt tgacagatga agaaattgag gcagattgcg ttaagtgctg taccctaagg | 120 |
| tgatatgcag ctaattaaat ggcagatttt aatccaggtc tgtctcactc taaagccctt | 180 |
| tacattatat gctctttaca ttataaggcc ttacccaccc tatattggag ttggccccaa | 240 |
| ttccaatatg tgttccagat cggacctccc tgaggacagc aacactctgt atcctgggtc | 300 |
| acatttgtgg ctgaggcacg cccttaattc caaggtgggc tccaagggtg agactttcag | 360 |
| gctctggggc agtcagcggg aggaggtatt tctggacaat gaagacccca tcaaatcaca | 420 |
| ggctggtggg cagggcagag gaggcgcacc cctgcccccc actggcctgt cagttcagct | 480 |
| cagcggtgtg gactcccagc ttctgagctg tgggaataga gtctgcacaa cgcagggccc | 540 |
| cgaagagctc tcacggtttc tttggcaggt tcactgggtg tggggcaccg agtgtcctcc | 600 |
| ccagccaggg cagagctggt ggcaagccca gggcacttct cgctgctcta gcccaggcag | 660 |
| cccctcctct gggcctgggc ggagaggtta atttggggaa tggacacaaa gagggaggat | 720 |
| cgaagagtca gagcctcagg aatgcccagc cagagcagtt cagacattga gaggagaagc | 780 |
| tggctctgag gaagatttat ttgctctgag gctctgcatc ccccagccat ccccccagag | 840 |
| cctctccctg tggggaacac aggacacagg cagagtcctc cccacagctt gcatctgtcc | 900 |
| cctgaacagg gcaacctgga cgccaggctg gatggagggg agaaggcgat gcagccgcaa | 960 |
| tggtagtctc catggtgtgt gaggagccgg cacctgctct cacacgatgc catcaaagcc | 1020 |
| ctgcaggcca cacttcttgc cggccacctg gcacccgaat ctcagtgctt cctgcacgct | 1080 |
| cctcccctgg gagaggctga agatgacgga ggcattgaag gtgtctccag ctcccagtgt | 1140 |
| atccaccacg cggggtggcg ggaaagcatc cgagtggagc aatttgccat cagggcccag | 1200 |
| ggcgtcggcg ccctcctcag cccaggcaca gacaagcaca gcccctttcc tcacacgacc | 1260 |
| atacaagccc ctcaaggctt cctctgctga ctggaacccc aagtgcttgg ccacatcttt | 1320 |
| gctgacaaac accacgtctc cgtagccaaa cagctggaag agctcctctc gtggcttctc | 1380 |
| cacctccacg gacacccgga tcttctgctc tggaggctgc ctggtgttgt gtgcgtctat | 1440 |
| ccgctgcagc atcttcacct gctccgatgc gttccggccc tcaatgtgga tccacttgaa | 1500 |
| ctgggtcaga tcaaccttct caaagtctgt agcagacaca tctggcaggc tctcagcaac | 1560 |
| atggccagga gccattgagc ccatgaaggc acagggggct ccgagcaggg agagaacggt | 1620 |
| gcaggagttg gacgcgttgc ctccgcgctg ccatctctgg gacaaacacc ttatctccga | 1680 |
| gtcctcctta gggtacttgt ccaccaggct gatgacgtcc agcaccacta gccccacgca | 1740 |
| caggatctgc ttctcttcca tgaggctact cccagagctt cctgcccgcc cggctgacgg | 1800 |
| ggttcctccc ggcctctgcc tcttatccag gaggatggtg tccccgctcc cagctgccct | 1860 |
| ggctcctcct ccgcgtggga gctcctcctc cagggagcca cctgcagcgg ccaggggtgc | 1920 |
| agggaacgaa aggagcaggg cccttcctcg cgacacccga agacccgagc gggtctagga | 1980 |
| aagccaaccc agaggtcttg gtccccggtc ttcccgtagc aggttgcctg ggcctgcaga | 2040 |
| tggcaacgcc tcccacttct cagccttagt ttcctcgctt gtcagatgga ctcacagctg | 2100 |
| atgcaaacct ttttaaagcg cggctaagcg atctcgagaa tgcaaagaga aaatgcgcta | 2160 |
| cttgccccgc actctcctgc acctgcgtct ccgactcccg acccgggaca cgcgaggtac | 2220 |
| agctgggcct cgcatctgca gccctgcctg aagcccgcgg tcgcggcggc cccgccccgc | 2280 |
| ccc | 2283 |
| <210> 3 | |
| <211> 1999 | |
| <212> DNA | |
| <213> Homo sapiens | |
| <400> 3 | |
| accgcgggct tcaggcaggg ctgcagatgc gaggcccagc tgtacctcgc gtgtcccggg | 60 |
| tcgggagtcg gagacgcagg tgcaggagag tgcggggcaa gtagcgcatt ttctctttgc | 120 |
| attctcgaga tcgcttagcc gcgctttaaa aaggtttgca tcagctgtga gtccatctga | 180 |
| caagcgagga aactaaggct gagaagtggg aggcgttgcc atctgcaggc ccaggcaacc | 240 |
| tgctacggga agaccgggga ccaagacctc tgggttggct ttcctagacc cgctcgggtc | 300 |
| ttcgggtgtc gcgaggaagg gccctgctcc tttcgttccc tgcacccctg gccgctgcag | 360 |
| gtggctccct ggaggaggag ctcccacgcg gaggaggagc cagggcagct gggagcgggg | 420 |
| acaccatcct cctggataag aggcagaggc cgggaggaac cccgtcagcc gggcgggcag | 480 |
| gaagctctgg gagtagcctc atggaagaga agcagatcct gtgcgtgggg ctagtggtgc | 540 |
| tggacgtcat cagcctggtg gacaagtacc ctaaggagga ctcggagata aggtgtttgt | 600 |
| cccagagatg gcagcgcgga ggcaacgcgt ccaactcctg caccgttctc tccctgctcg | 660 |
| gagccccctg tgccttcatg ggctcaatgg ctcctggcca tgttgctgac agttttgtcc | 720 |
| tggatgacct ccgccgctat tctgtggacc tacgctacac agtctttcag accacaggct | 780 |
| ccgtccccat cgccacggtc atcatcaacg aggccagtgg tagccgcacc atcctatact | 840 |
| atgacagctt cctggtggcc gacttcaggc ggcggggcgt ggacgtgtct caggtggcct | 900 |
| ggcagagcaa gggggacacc cccagctcct gctgcatcat caacaactcc aatggcaacc | 960 |
| gtaccattgt gctccatgac acgagcctgc cagatgtgtc tgctacagac tttgagaagg | 1020 |
| ttgatctgac ccagttcaag tggatccaca ttgagggccg gaacgcatcg gagcaggtga | 1080 |
| agatgctgca gcggatagac gcacacaaca ccaggcagcc tccagagcag aagatccggg | 1140 |
| tgtccgtgga ggtggagaag ccacgagagg agctcttcca gctgtttggc tacggagacg | 1200 |
| tggtgggtgc cccattcagc ctctctttgc cacttccagc taatttggtt cttaaaggga | 1260 |
| gccagaatcc ttttatcctg cctaccacaa ttggaatagt ggttcctggt ttggtggtgt | 1320 |
| ttgaagatgg gggatggggg ttaaagcaaa gaagtagacc cctagccttg ggctccagtg | 1380 |
| caggcctcag cagtgagcaa ggagtagaat gtctccaccc caggtgggtg cataggtgta | 1440 |
| agaatgccca gagggcttgg gtagggctta aacagccaca gggcaagcct gtgtggaagc | 1500 |
| atctcctctc tggggctccc cagtcttttc ctctgcagaa tgagggcaca caactgttct | 1560 |
| ctgaggtttc ttccaactca ggggtgtctg gcaggttgtg ggggctgcta gggtgaggga | 1620 |
| agggtgggaa ggagacttgc atgagtctct ttttgaaaag gctggatgta aatggaattt | 1680 |
| gggaagtaat cccagcatca tagcagaagt tggttggaga ccatccagcc aaggtcctca | 1740 |
| accttgtgac ttgtcctcaa ccttggctgc atattaaaaa agatgaatgc aggccaagtg | 1800 |
| tagtggctca cacttgtaat cccagagctt tgggaagctg aggtaggagg attgcttgat | 1860 |
| gccaggagtc caagaccagc ctggacaaca tagcaagacc cctgtctcta tgaaaataaa | 1920 |
| ttaggccaag agcagtgact catacctgta atcccagcac cttgggaggc caatgcagga | 1980 |
| ggatcacttc agccagtca | 1999 |
| <210> 4 | |
| <211> 1999 | |
| <212> DNA | |
| <213> Homo sapiens | |
| <400> 4 | |
| tgactggctg aagtgatcct cctgcattgg cctcccaagg tgctgggatt acaggtatga | 60 |
| gtcactgctc ttggcctaat ttattttcat agagacaggg gtcttgctat gttgtccagg | 120 |
| ctggtcttgg actcctggca tcaagcaatc ctcctacctc agcttcccaa agctctggga | 180 |
| ttacaagtgt gagccactac acttggcctg cattcatctt ttttaatatg cagccaaggt | 240 |
| tgaggacaag tcacaaggtt gaggaccttg gctggatggt ctccaaccaa cttctgctat | 300 |
| gatgctggga ttacttccca aattccattt acatccagcc ttttcaaaaa gagactcatg | 360 |
| caagtctcct tcccaccctt ccctcaccct agcagccccc acaacctgcc agacacccct | 420 |
| gagttggaag aaacctcaga gaacagttgt gtgccctcat tctgcagagg aaaagactgg | 480 |
| ggagccccag agaggagatg cttccacaca ggcttgccct gtggctgttt aagccctacc | 540 |
| caagccctct gggcattctt acacctatgc acccacctgg ggtggagaca ttctactcct | 600 |
| tgctcactgc tgaggcctgc actggagccc aaggctaggg gtctacttct ttgctttaac | 660 |
| ccccatcccc catcttcaaa caccaccaaa ccaggaacca ctattccaat tgtggtaggc | 720 |
| aggataaaag gattctggct ccctttaaga accaaattag ctggaagtgg caaagagagg | 780 |
| ctgaatgggg cacccaccac gtctccgtag ccaaacagct ggaagagctc ctctcgtggc | 840 |
| ttctccacct ccacggacac ccggatcttc tgctctggag gctgcctggt gttgtgtgcg | 900 |
| tctatccgct gcagcatctt cacctgctcc gatgcgttcc ggccctcaat gtggatccac | 960 |
| ttgaactggg tcagatcaac cttctcaaag tctgtagcag acacatctgg caggctcgtg | 1020 |
| tcatggagca caatggtacg gttgccattg gagttgttga tgatgcagca ggagctgggg | 1080 |
| gtgtccccct tgctctgcca ggccacctga gacacgtcca cgccccgccg cctgaagtcg | 1140 |
| gccaccagga agctgtcata gtataggatg gtgcggctac cactggcctc gttgatgatg | 1200 |
| accgtggcga tggggacgga gcctgtggtc tgaaagactg tgtagcgtag gtccacagaa | 1260 |
| tagcggcgga ggtcatccag gacaaaactg tcagcaacat ggccaggagc cattgagccc | 1320 |
| atgaaggcac agggggctcc gagcagggag agaacggtgc aggagttgga cgcgttgcct | 1380 |
| ccgcgctgcc atctctggga caaacacctt atctccgagt cctccttagg gtacttgtcc | 1440 |
| accaggctga tgacgtccag caccactagc cccacgcaca ggatctgctt ctcttccatg | 1500 |
| aggctactcc cagagcttcc tgcccgcccg gctgacgggg ttcctcccgg cctctgcctc | 1560 |
| ttatccagga ggatggtgtc cccgctccca gctgccctgg ctcctcctcc gcgtgggagc | 1620 |
| tcctcctcca gggagccacc tgcagcggcc aggggtgcag ggaacgaaag gagcagggcc | 1680 |
| cttcctcgcg acacccgaag acccgagcgg gtctaggaaa gccaacccag aggtcttggt | 1740 |
| ccccggtctt cccgtagcag gttgcctggg cctgcagatg gcaacgcctc ccacttctca | 1800 |
| gccttagttt cctcgcttgt cagatggact cacagctgat gcaaaccttt ttaaagcgcg | 1860 |
| gctaagcgat ctcgagaatg caaagagaaa atgcgctact tgccccgcac tctcctgcac | 1920 |
| ctgcgtctcc gactcccgac ccgggacacg cgaggtacag ctgggcctcg catctgcagc | 1980 |
| cctgcctgaa gcccgcggt | 1999 |
| <210> 5 | |
| <211> 1996 | |
| <212> DNA | |
| <213> Homo sapiens | |
| <400> 5 | |
| accgcgggct tcaggcaggg ctgcagatgc gaggcccagc tgtacctcgc gtgtcccggg | 60 |
| tcgggagtcg gagacgcagg tgcaggagag tgcggggcaa gtagcgcatt ttctctttgc | 120 |
| attctcgaga tcgcttagcc gcgctttaaa aaggtttgca tcagctgtga gtccatctga | 180 |
| caagcgagga aactaaggct gagaagtggg aggcgttgcc atctgcaggc ccaggcaacc | 240 |
| tgctacggga agaccgggga ccaagacctc tgggttggct ttcctagacc cgctcgggtc | 300 |
| ttcgggtgtc gcgaggaagg gccctgctcc tttcgttccc tgcacccctg gccgctgcag | 360 |
| gtggctccct ggaggaggag ctcccacgcg gaggaggagc cagggcagct gggagcgggg | 420 |
| acaccatcct cctggataag aggcagaggc cgggaggaac cccgtcagcc gggcgggcag | 480 |
| gaagctctgg gagtagcctc atggaagaga agcagatcct gtgcgtgggg ctagtggtgc | 540 |
| tggacgtcat cagcctggtg gacaagtacc ctaaggagga ctcggagata aggtgtttgt | 600 |
| cccagagatg gcagcgcgga ggcaacgcgt ccaactcctg caccgttctc tccctgctcg | 660 |
| gagccccctg tgccttcatg ggctcaatgg ctcctggcca tgttgctgat tttgtcctgg | 720 |
| atgacctccg ccgctattct gtggacctac gctacacagt ctttcagacc acaggctccg | 780 |
| tccccatcgc cacggtcatc atcaacgagg ccagtggtag ccgcaccatc ctatactatg | 840 |
| acagcttcct ggtggccgac ttcaggcggc ggggcgtgga cgtgtctcag gtggcctggc | 900 |
| agagcaaggg ggacaccccc agctcctgct gcatcatcaa caactccaat ggcaaccgta | 960 |
| ccattgtgct ccatgacacg agcctgccag atgtgtctgc tacagacttt gagaaggttg | 1020 |
| atctgaccca gttcaagtgg atccacattg agggccggaa cgcatcggag caggtgaaga | 1080 |
| tgctgcagcg gatagacgca cacaacacca ggcagcctcc agagcagaag atccgggtgt | 1140 |
| ccgtggaggt ggagaagcca cgagaggagc tcttccagct gtttggctac ggagacgtgg | 1200 |
| tgggtgcccc attcagcctc tctttgccac ttccagctaa tttggttctt aaagggagcc | 1260 |
| agaatccttt tatcctgcct accacaattg gaatagtggt tcctggtttg gtggtgtttg | 1320 |
| aagatggggg atgggggtta aagcaaagaa gtagacccct agccttgggc tccagtgcag | 1380 |
| gcctcagcag tgagcaagga gtagaatgtc tccaccccag gtgggtgcat aggtgtaaga | 1440 |
| atgcccagag ggcttgggta gggcttaaac agccacaggg caagcctgtg tggaagcatc | 1500 |
| tcctctctgg ggctccccag tcttttcctc tgcagaatga gggcacacaa ctgttctctg | 1560 |
| aggtttcttc caactcaggg gtgtctggca ggttgtgggg gctgctaggg tgagggaagg | 1620 |
| gtgggaagga gacttgcatg agtctctttt tgaaaaggct ggatgtaaat ggaatttggg | 1680 |
| aagtaatccc agcatcatag cagaagttgg ttggagacca tccagccaag gtcctcaacc | 1740 |
| ttgtgacttg tcctcaacct tggctgcata ttaaaaaaga tgaatgcagg ccaagtgtag | 1800 |
| tggctcacac ttgtaatccc agagctttgg gaagctgagg taggaggatt gcttgatgcc | 1860 |
| aggagtccaa gaccagcctg gacaacatag caagacccct gtctctatga aaataaatta | 1920 |
| ggccaagagc agtgactcat acctgtaatc ccagcacctt gggaggccaa tgcaggagga | 1980 |
| tcacttcagc cagtca | 1996 |
| <210> 6 | |
| <211> 1996 | |
| <212> DNA | |
| <213> Homo sapiens | |
| <400> 6 | |
| tgactggctg aagtgatcct cctgcattgg cctcccaagg tgctgggatt acaggtatga | 60 |
| gtcactgctc ttggcctaat ttattttcat agagacaggg gtcttgctat gttgtccagg | 120 |
| ctggtcttgg actcctggca tcaagcaatc ctcctacctc agcttcccaa agctctggga | 180 |
| ttacaagtgt gagccactac acttggcctg cattcatctt ttttaatatg cagccaaggt | 240 |
| tgaggacaag tcacaaggtt gaggaccttg gctggatggt ctccaaccaa cttctgctat | 300 |
| gatgctggga ttacttccca aattccattt acatccagcc ttttcaaaaa gagactcatg | 360 |
| caagtctcct tcccaccctt ccctcaccct agcagccccc acaacctgcc agacacccct | 420 |
| gagttggaag aaacctcaga gaacagttgt gtgccctcat tctgcagagg aaaagactgg | 480 |
| ggagccccag agaggagatg cttccacaca ggcttgccct gtggctgttt aagccctacc | 540 |
| caagccctct gggcattctt acacctatgc acccacctgg ggtggagaca ttctactcct | 600 |
| tgctcactgc tgaggcctgc actggagccc aaggctaggg gtctacttct ttgctttaac | 660 |
| ccccatcccc catcttcaaa caccaccaaa ccaggaacca ctattccaat tgtggtaggc | 720 |
| aggataaaag gattctggct ccctttaaga accaaattag ctggaagtgg caaagagagg | 780 |
| ctgaatgggg cacccaccac gtctccgtag ccaaacagct ggaagagctc ctctcgtggc | 840 |
| ttctccacct ccacggacac ccggatcttc tgctctggag gctgcctggt gttgtgtgcg | 900 |
| tctatccgct gcagcatctt cacctgctcc gatgcgttcc ggccctcaat gtggatccac | 960 |
| ttgaactggg tcagatcaac cttctcaaag tctgtagcag acacatctgg caggctcgtg | 1020 |
| tcatggagca caatggtacg gttgccattg gagttgttga tgatgcagca ggagctgggg | 1080 |
| gtgtccccct tgctctgcca ggccacctga gacacgtcca cgccccgccg cctgaagtcg | 1140 |
| gccaccagga agctgtcata gtataggatg gtgcggctac cactggcctc gttgatgatg | 1200 |
| accgtggcga tggggacgga gcctgtggtc tgaaagactg tgtagcgtag gtccacagaa | 1260 |
| tagcggcgga ggtcatccag gacaaaatca gcaacatggc caggagccat tgagcccatg | 1320 |
| aaggcacagg gggctccgag cagggagaga acggtgcagg agttggacgc gttgcctccg | 1380 |
| cgctgccatc tctgggacaa acaccttatc tccgagtcct ccttagggta cttgtccacc | 1440 |
| aggctgatga cgtccagcac cactagcccc acgcacagga tctgcttctc ttccatgagg | 1500 |
| ctactcccag agcttcctgc ccgcccggct gacggggttc ctcccggcct ctgcctctta | 1560 |
| tccaggagga tggtgtcccc gctcccagct gccctggctc ctcctccgcg tgggagctcc | 1620 |
| tcctccaggg agccacctgc agcggccagg ggtgcaggga acgaaaggag cagggccctt | 1680 |
| cctcgcgaca cccgaagacc cgagcgggtc taggaaagcc aacccagagg tcttggtccc | 1740 |
| cggtcttccc gtagcaggtt gcctgggcct gcagatggca acgcctccca cttctcagcc | 1800 |
| ttagtttcct cgcttgtcag atggactcac agctgatgca aaccttttta aagcgcggct | 1860 |
| aagcgatctc gagaatgcaa agagaaaatg cgctacttgc cccgcactct cctgcacctg | 1920 |
| cgtctccgac tcccgacccg ggacacgcga ggtacagctg ggcctcgcat ctgcagccct | 1980 |
| gcctgaagcc cgcggt | 1996 |
| <210> 7 | |
| <211> 2534 | |
| <212> DNA | |
| <213> Homo sapiens | |
| <400> 7 | |
| accgcgggct tcaggcaggg ctgcagatgc gaggcccagc tgtacctcgc gtgtcccggg | 60 |
| tcgggagtcg gagacgcagg tgcaggagag tgcggggcaa gtagcgcatt ttctctttgc | 120 |
| attctcgaga tcgcttagcc gcgctttaaa aaggtttgca tcagctgtga gtccatctga | 180 |
| caagcgagga aactaaggct gagaagtggg aggcgttgcc atctgcaggc ccaggcaacc | 240 |
| tgctacggga agaccgggga ccaagacctc tgggttggct ttcctagacc cgctcgggtc | 300 |
| ttcgggtgtc gcgaggaagg gccctgctcc tttcgttccc tgcacccctg gccgctgcag | 360 |
| gtggctccct ggaggaggag ctcccacgcg gaggaggagc cagggcagct gggagcgggg | 420 |
| acaccatcct cctggataag aggcagaggc cgggaggaac cccgtcagcc gggcgggcag | 480 |
| gaagctctgg gagtagcctc atggaagaga agcagatcct gtgcgtgggg ctagtggtgc | 540 |
| tggacgtcat cagcctggtg gacaagtacc ctaaggagga ctcggagata aggtgtttgt | 600 |
| cccagagatg gcagcgcgga ggcaacgcgt ccaactcctg caccgttctc tccctgctcg | 660 |
| gagccccctg tgccttcatg ggctcaatgg ctcctggcca tgttgctgac agttttgtcc | 720 |
| tggatgacct ccgccgctat tctgtggacc tacgctacac agtctttcag accacaggct | 780 |
| ccgtccccat cgccacggtc atcatcaacg aggccagtgg tagccgcacc atcctatact | 840 |
| atgacagctt cctggtggcc gacttcaggc gggcgggcgt ggacgtgtct caggtggcct | 900 |
| ggcagagcaa gggggacacc cccagctcct gctgcatcat caacaactcc aatggcaacc | 960 |
| gtaccattgt gctccatgac acgagcctgc cagatgtgtc tgctacagac tttgagaagg | 1020 |
| ttgatctgac ccagttcaag tggatccaca ttgagggccg gaacgcatcg gagcaggtga | 1080 |
| agatgctgca gcggatagac gcacacaaca ccaggcagcc tccagagcag aagatccggg | 1140 |
| tgtccgtgga ggtggagaag ccacgagagg agctcttcca gctgtttggc tacggagacg | 1200 |
| tggtgtttgt cagcaaagat gtggccaagc acttggggtt ccagtcagca gaggaagcct | 1260 |
| tgaggggctt gtatggtcgt gtgaggaaag gggctgtgct tgtctgtgcc tgggctgagg | 1320 |
| agggcgccga cgccctgggc cctgatggca aattgctcca ctcggatgct ttcccgccac | 1380 |
| cccgcgtggt ggatacactg ggagctggag acaccttcaa tgcctccgtc atcttcagcc | 1440 |
| tctcccaggg gaggagcgtg caggaagcac tgagattcgg gtgccaggtg gccggcaaga | 1500 |
| agtgtggcct gcagggcttt gatggcatcg tgtgagagca ggtgccggct cctcacacac | 1560 |
| catggagact accattgcgg ctgcatcgcc ttctcccctc catccagcct ggcgtccagg | 1620 |
| ttgccctgtt caggggacag atgcaagctg tggggaggac tctgcctgtg tcctgtgttc | 1680 |
| cccacaggga gaggctctgg ggggatggct gggggatgca gagcctcaga gcaaataaat | 1740 |
| cttcctcaga gccagcttct cctctcaatg tctgaactgc tctggctggg cattcctgag | 1800 |
| gctctgactc ttcgatcctc cctctttgtg tccattcccc aaattaacct ctccgcccag | 1860 |
| gcccagagga ggggctgcct gggctagagc agcgagaagt gccctgggct tgccaccagc | 1920 |
| tctgccctgg ctggggagga cactcggtgc cccacaccca gtgaacctgc caaagaaacc | 1980 |
| gtgagagctc ttcggggccc tgcgttgtgc agactctatt cccacagctc agaagctggg | 2040 |
| agtccacacc gctgagctga actgacaggc cagtgggggg caggggtgcg cctcctctgc | 2100 |
| cctgcccacc agcctgtgat ttgatggggt cttcattgtc cagaaatacc tcctcccgct | 2160 |
| gactgcccca gagcctgaaa gtctcaccct tggagcccac cttggaatta agggcgtgcc | 2220 |
| tcagccacaa atgtgaccca ggatacagag tgttgctgtc ctcagggagg tccgatctgg | 2280 |
| aacacatatt ggaattgggg ccaactccaa tatagggtgg gtaaggcctt ataatgtaaa | 2340 |
| gagcatataa tgtaaagggc tttagagtga gacagacctg gattaaaatc tgccatttaa | 2400 |
| ttagctgcat atcaccttag ggtacagcac ttaacgcaat ctgcctcaat ttcttcatct | 2460 |
| gtcaaatgga accaattctg cttggctaca gaattattgt gaggataaaa tcatatataa | 2520 |
| aatgcccagc atga | 2534 |
| <210> 8 | |
| <211> 2534 | |
| <212> DNA | |
| <213> Homo sapiens | |
| <400> 8 | |
| tcatgctggg cattttatat atgattttat cctcacaata attctgtagc caagcagaat | 60 |
| tggttccatt tgacagatga agaaattgag gcagattgcg ttaagtgctg taccctaagg | 120 |
| tgatatgcag ctaattaaat ggcagatttt aatccaggtc tgtctcactc taaagccctt | 180 |
| tacattatat gctctttaca ttataaggcc ttacccaccc tatattggag ttggccccaa | 240 |
| ttccaatatg tgttccagat cggacctccc tgaggacagc aacactctgt atcctgggtc | 300 |
| acatttgtgg ctgaggcacg cccttaattc caaggtgggc tccaagggtg agactttcag | 360 |
| gctctggggc agtcagcggg aggaggtatt tctggacaat gaagacccca tcaaatcaca | 420 |
| ggctggtggg cagggcagag gaggcgcacc cctgcccccc actggcctgt cagttcagct | 480 |
| cagcggtgtg gactcccagc ttctgagctg tgggaataga gtctgcacaa cgcagggccc | 540 |
| cgaagagctc tcacggtttc tttggcaggt tcactgggtg tggggcaccg agtgtcctcc | 600 |
| ccagccaggg cagagctggt ggcaagccca gggcacttct cgctgctcta gcccaggcag | 660 |
| cccctcctct gggcctgggc ggagaggtta atttggggaa tggacacaaa gagggaggat | 720 |
| cgaagagtca gagcctcagg aatgcccagc cagagcagtt cagacattga gaggagaagc | 780 |
| tggctctgag gaagatttat ttgctctgag gctctgcatc ccccagccat ccccccagag | 840 |
| cctctccctg tggggaacac aggacacagg cagagtcctc cccacagctt gcatctgtcc | 900 |
| cctgaacagg gcaacctgga cgccaggctg gatggagggg agaaggcgat gcagccgcaa | 960 |
| tggtagtctc catggtgtgt gaggagccgg cacctgctct cacacgatgc catcaaagcc | 1020 |
| ctgcaggcca cacttcttgc cggccacctg gcacccgaat ctcagtgctt cctgcacgct | 1080 |
| cctcccctgg gagaggctga agatgacgga ggcattgaag gtgtctccag ctcccagtgt | 1140 |
| atccaccacg cggggtggcg ggaaagcatc cgagtggagc aatttgccat cagggcccag | 1200 |
| ggcgtcggcg ccctcctcag cccaggcaca gacaagcaca gcccctttcc tcacacgacc | 1260 |
| atacaagccc ctcaaggctt cctctgctga ctggaacccc aagtgcttgg ccacatcttt | 1320 |
| gctgacaaac accacgtctc cgtagccaaa cagctggaag agctcctctc gtggcttctc | 1380 |
| cacctccacg gacacccgga tcttctgctc tggaggctgc ctggtgttgt gtgcgtctat | 1440 |
| ccgctgcagc atcttcacct gctccgatgc gttccggccc tcaatgtgga tccacttgaa | 1500 |
| ctgggtcaga tcaaccttct caaagtctgt agcagacaca tctggcaggc tcgtgtcatg | 1560 |
| gagcacaatg gtacggttgc cattggagtt gttgatgatg cagcaggagc tgggggtgtc | 1620 |
| ccccttgctc tgccaggcca cctgagacac gtccacgccc cgccgcctga agtcggccac | 1680 |
| caggaagctg tcatagtata ggatggtgcg gctaccactg gcctcgttga tgatgaccgt | 1740 |
| ggcgatgggg acggagcctg tggtctgaaa gactgtgtag cgtaggtcca cagaatagcg | 1800 |
| gcggaggtca tccaggacaa aactgtcagc aacatggcca ggagccattg agcccatgaa | 1860 |
| ggcacagggg gctccgagca gggagagaac ggtgcaggag ttggacgcgt tgcctccgcg | 1920 |
| ctgccatctc tgggacaaac accttatctc cgagtcctcc ttagggtact tgtccaccag | 1980 |
| gctgatgacg tccagcacca ctagccccac gcacaggatc tgcttctctt ccatgaggct | 2040 |
| actcccagag cttcctgccc gcccggctga cggggttcct cccggcctct gcctcttatc | 2100 |
| caggaggatg gtgtccccgc tcccagctgc cctggctcct cctccgcgtg ggagctcctc | 2160 |
| ctccagggag ccacctgcag cggccagggg tgcagggaac gaaaggagca gggcccttcc | 2220 |
| tcgcgacacc cgaagacccg agcgggtcta ggaaagccaa cccagaggtc ttggtccccg | 2280 |
| gtcttcccgt agcaggttgc ctgggcctgc agatggcaac gcctcccact tctcagcctt | 2340 |
| agtttcctcg cttgtcagat ggactcacag ctgatgcaaa cctttttaaa gcgcggctaa | 2400 |
| gcgatctcga gaatgcaaag agaaaatgcg ctacttgccc cgcactctcc tgcacctgcg | 2460 |
| tctccgactc ccgacccggg acacgcgagg tacagctggg cctcgcatct gcagccctgc | 2520 |
| ctgaagcccg cggt | 2534 |
| <210> 9 | |
| <211> 2531 | |
| <212> DNA | |
| <213> Homo sapiens | |
| <400> 9 | |
| accgcgggct tcaggcaggg ctgcagatgc gaggcccagc tgtacctcgc gtgtcccggg | 60 |
| tcgggagtcg gagacgcagg tgcaggagag tgcggggcaa gtagcgcatt ttctctttgc | 120 |
| attctcgaga tcgcttagcc gcgctttaaa aaggtttgca tcagctgtga gtccatctga | 180 |
| caagcgagga aactaaggct gagaagtggg aggcgttgcc atctgcaggc ccaggcaacc | 240 |
| tgctacggga agaccgggga ccaagacctc tgggttggct ttcctagacc cgctcgggtc | 300 |
| ttcgggtgtc gcgaggaagg gccctgctcc tttcgttccc tgcacccctg gccgctgcag | 360 |
| gtggctccct ggaggaggag ctcccacgcg gaggaggagc cagggcagct gggagcgggg | 420 |
| acaccatcct cctggataag aggcagaggc cgggaggaac cccgtcagcc gggcgggcag | 480 |
| gaagctctgg gagtagcctc atggaagaga agcagatcct gtgcgtgggg ctagtggtgc | 540 |
| tggacgtcat cagcctggtg gacaagtacc ctaaggagga ctcggagata aggtgtttgt | 600 |
| cccagagatg gcagcgcgga ggcaacgcgt ccaactcctg caccgttctc tccctgctcg | 660 |
| gagccccctg tgccttcatg ggctcaatgg ctcctggcca tgttgctgat tttgtcctgg | 720 |
| atgacctccg ccgctattct gtggacctac gctacacagt ctttcagacc acaggctccg | 780 |
| tccccatcgc cacggtcatc atcaacgagg ccagtggtag ccgcaccatc ctatactatg | 840 |
| acagcttcct ggtggccgac ttcaggcggc ggggcgtgga cgtgtctcag gtggcctggc | 900 |
| agagcaaggg ggacaccccc agctcctgct gcatcatcaa caactccaat ggcaaccgta | 960 |
| ccattgtgct ccatgacacg agcctgccag atgtgtctgc tacagacttt gagaaggttg | 1020 |
| atctgaccca gttcaagtgg atccacattg agggccggaa cgcatcggag caggtgaaga | 1080 |
| tgctgcagcg gatagacgca cacaacacca ggcagcctcc agagcagaag atccgggtgt | 1140 |
| ccgtggaggt ggagaagcca cgagaggagc tcttccagct gtttggctac ggagacgtgg | 1200 |
| tgtttgtcag caaagatgtg gccaagcact tggggttcca gtcagcagag gaagccttga | 1260 |
| ggggcttgta tggtcgtgtg aggaaagggg ctgtgcttgt ctgtgcctgg gctgaggagg | 1320 |
| gcgccgacgc cctgggccct gatggcaaat tgctccactc ggatgctttc ccgccacccc | 1380 |
| gcgtggtgga tacactggga gctggagaca ccttcaatgc ctccgtcatc ttcagcctct | 1440 |
| cccaggggag gagcgtgcag gaagcactga gattcgggtg ccaggtggcc ggcaagaagt | 1500 |
| gtggcctgca gggctttgat ggcatcgtgt gagagcaggt gccggctcct cacacaccat | 1560 |
| ggagactacc attgcggctg catcgccttc tcccctccat ccagcctggc gtccaggttg | 1620 |
| ccctgttcag gggacagatg caagctgtgg ggaggactct gcctgtgtcc tgtgttcccc | 1680 |
| acagggagag gctctggggg gatggctggg ggatgcagag cctcagagca aataaatctt | 1740 |
| cctcagagcc agcttctcct ctcaatgtct gaactgctct ggctgggcat tcctgaggct | 1800 |
| ctgactcttc gatcctccct ctttgtgtcc attccccaaa ttaacctctc cgcccaggcc | 1860 |
| cagaggaggg gctgcctggg ctagagcagc gagaagtgcc ctgggcttgc caccagctct | 1920 |
| gccctggctg gggaggacac tcggtgcccc acacccagtg aacctgccaa agaaaccgtg | 1980 |
| agagctcttc ggggccctgc gttgtgcaga ctctattccc acagctcaga agctgggagt | 2040 |
| ccacaccgct gagctgaact gacaggccag tggggggcag gggtgcgcct cctctgccct | 2100 |
| gcccaccagc ctgtgatttg atggggtctt cattgtccag aaatacctcc tcccgctgac | 2160 |
| tgccccagag cctgaaagtc tcacccttgg agcccacctt ggaattaagg gcgtgcctca | 2220 |
| gccacaaatg tgacccagga tacagagtgt tgctgtcctc agggaggtcc gatctggaac | 2280 |
| acatattgga attggggcca actccaatat agggtgggta aggccttata atgtaaagag | 2340 |
| catataatgt aaagggcttt agagtgagac agacctggat taaaatctgc catttaatta | 2400 |
| gctgcatatc accttagggt acagcactta acgcaatctg cctcaatttc ttcatctgtc | 2460 |
| aaatggaacc aattctgctt ggctacagaa ttattgtgag gataaaatca tatataaaat | 2520 |
| gcccagcatg a | 2531 |
| <210> 10 | |
| <211> 2531 | |
| <212> DNA | |
| <213> Homo sapiens | |
| <400> 10 | |
| tcatgctggg cattttatat atgattttat cctcacaata attctgtagc caagcagaat | 60 |
| tggttccatt tgacagatga agaaattgag gcagattgcg ttaagtgctg taccctaagg | 120 |
| tgatatgcag ctaattaaat ggcagatttt aatccaggtc tgtctcactc taaagccctt | 180 |
| tacattatat gctctttaca ttataaggcc ttacccaccc tatattggag ttggccccaa | 240 |
| ttccaatatg tgttccagat cggacctccc tgaggacagc aacactctgt atcctgggtc | 300 |
| acatttgtgg ctgaggcacg cccttaattc caaggtgggc tccaagggtg agactttcag | 360 |
| gctctggggc agtcagcggg aggaggtatt tctggacaat gaagacccca tcaaatcaca | 420 |
| ggctggtggg cagggcagag gaggcgcacc cctgcccccc actggcctgt cagttcagct | 480 |
| cagcggtgtg gactcccagc ttctgagctg tgggaataga gtctgcacaa cgcagggccc | 540 |
| cgaagagctc tcacggtttc tttggcaggt tcactgggtg tggggcaccg agtgtcctcc | 600 |
| ccagccaggg cagagctggt ggcaagccca gggcacttct cgctgctcta gcccaggcag | 660 |
| cccctcctct gggcctgggc ggagaggtta atttggggaa tggacacaaa gagggaggat | 720 |
| cgaagagtca gagcctcagg aatgcccagc cagagcagtt cagacattga gaggagaagc | 780 |
| tggctctgag gaagatttat ttgctctgag gctctgcatc ccccagccat ccccccagag | 840 |
| cctctccctg tggggaacac aggacacagg cagagtcctc cccacagctt gcatctgtcc | 900 |
| cctgaacagg gcaacctgga cgccaggctg gatggagggg agaaggcgat gcagccgcaa | 960 |
| tggtagtctc catggtgtgt gaggagccgg cacctgctct cacacgatgc catcaaagcc | 1020 |
| ctgcaggcca cacttcttgc cggccacctg gcacccgaat ctcagtgctt cctgcacgct | 1080 |
| cctcccctgg gagaggctga agatgacgga ggcattgaag gtgtctccag ctcccagtgt | 1140 |
| atccaccacg cggggtggcg ggaaagcatc cgagtggagc aatttgccat cagggcccag | 1200 |
| ggcgtcggcg ccctcctcag cccaggcaca gacaagcaca gcccctttcc tcacacgacc | 1260 |
| atacaagccc ctcaaggctt cctctgctga ctggaacccc aagtgcttgg ccacatcttt | 1320 |
| gctgacaaac accacgtctc cgtagccaaa cagctggaag agctcctctc gtggcttctc | 1380 |
| cacctccacg gacacccgga tcttctgctc tggaggctgc ctggtgttgt gtgcgtctat | 1440 |
| ccgctgcagc atcttcacct gctccgatgc gttccggccc tcaatgtgga tccacttgaa | 1500 |
| ctgggtcaga tcaaccttct caaagtctgt agcagacaca tctggcaggc tcgtgtcatg | 1560 |
| gagcacaatg gtacggttgc cattggagtt gttgatgatg cagcaggagc tgggggtgtc | 1620 |
| ccccttgctc tgccaggcca cctgagacac gtccacgccc cgccgcctga agtcggccac | 1680 |
| caggaagctg tcatagtata ggatggtgcg gctaccactg gcctcgttga tgatgaccgt | 1740 |
| ggcgatgggg acggagcctg tggtctgaaa gactgtgtag cgtaggtcca cagaatagcg | 1800 |
| gcggaggtca tccaggacaa aatcagcaac atggccagga gccattgagc ccatgaaggc | 1860 |
| acagggggct ccgagcaggg agagaacggt gcaggagttg gacgcgttgc ctccgcgctg | 1920 |
| ccatctctgg gacaaacacc ttatctccga gtcctcctta gggtacttgt ccaccaggct | 1980 |
| gatgacgtcc agcaccacta gccccacgca caggatctgc ttctcttcca tgaggctact | 2040 |
| cccagagctt cctgcccgcc cggctgacgg ggttcctccc ggcctctgcc tcttatccag | 2100 |
| gaggatggtg tccccgctcc cagctgccct ggctcctcct ccgcgtggga gctcctcctc | 2160 |
| cagggagcca cctgcagcgg ccaggggtgc agggaacgaa aggagcaggg cccttcctcg | 2220 |
| cgacacccga agacccgagc gggtctagga aagccaaccc agaggtcttg gtccccggtc | 2280 |
| ttcccgtagc aggttgcctg ggcctgcaga tggcaacgcc tcccacttct cagccttagt | 2340 |
| ttcctcgctt gtcagatgga ctcacagctg atgcaaacct ttttaaagcg cggctaagcg | 2400 |
| atctcgagaa tgcaaagaga aaatgcgcta cttgccccgc actctcctgc acctgcgtct | 2460 |
| ccgactcccg acccgggaca cgcgaggtac agctgggcct cgcatctgca gccctgcctg | 2520 |
| aagcccgcgg t | 2531 |
| <210> 11 | |
| <211> 1864 | |
| <212> DNA | |
| <213> Homo sapiens | |
| <400> 11 | |
| accgcgggct tcaggcaggg ctgcagatgc gaggcccagc tgtacctcgc gtgtcccggg | 60 |
| tcgggagtcg gagacgcagg tgcaggagag tgcggggcaa gtagcgcatt ttctctttgc | 120 |
| attctcgaga tcgcttagcc gcgctttaaa aaggtttgca tcagctgtga gtccatctga | 180 |
| caagcgagga aactaaggct gagaagtggg aggcgttgcc atctgcaggc ccaggcaacc | 240 |
| tgctacggga agaccgggga ccaagacctc tgggttggct ttcctagacc cgctcgggtc | 300 |
| ttcgggtgtc gcgaggaagg gccctgctcc tttcgttccc tgcacccctg gccgctgcag | 360 |
| gtggctccct ggaggaggag ctcccacgcg gaggaggagc cagggcagct gggagcgggg | 420 |
| acaccatcct cctggataag aggcagaggc cgggaggaac cccgtcagcc gggcgggcag | 480 |
| gaagctctgg gagtagcctc atggaagaga agcagatcct gtgcgtgggg ctagtggtgc | 540 |
| tggacgtcat cagcctggtg gacaagtacc ctaaggagga ctcggagata aggtgtttgt | 600 |
| cccagagatg gcagcgcgga ggcaacgcgt ccaactcctg caccgttctc tccctgctcg | 660 |
| gagccccctg tgccttcatg ggctcaatgg ctcctggcca tgttgctgac agttttgtcc | 720 |
| tggatgacct ccgccgctat tctgtggacc tacgctacac agtctttcag accacaggct | 780 |
| ccgtccccat cgccacggtc atcatcaacg aggccagtgg tagccgcacc atcctatact | 840 |
| atgacaggag cctgccagat gtgtctgcta cagactttga gaaggttgat ctgacccagt | 900 |
| tcaagtggat ccacattgag ggccggaacg catcggagca ggtgaagatg ctgcagcgga | 960 |
| tagacgcaca caacaccagg cagcctccag agcagaagat ccgggtgtcc gtggaggtgg | 1020 |
| agaagccacg agaggagctc ttccagctgt ttggctacgg agacgtggtg ggtgccccat | 1080 |
| tcagcctctc tttgccactt ccagctaatt tggttcttaa agggagccag aatcctttta | 1140 |
| tcctgcctac cacaattgga atagtggttc ctggtttggt ggtgtttgaa gatgggggat | 1200 |
| gggggttaaa gcaaagaagt agacccctag ccttgggctc cagtgcaggc ctcagcagtg | 1260 |
| agcaaggagt agaatgtctc caccccaggt gggtgcatag gtgtaagaat gcccagaggg | 1320 |
| cttgggtagg gcttaaacag ccacagggca agcctgtgtg gaagcatctc ctctctgggg | 1380 |
| ctccccagtc ttttcctctg cagaatgagg gcacacaact gttctctgag gtttcttcca | 1440 |
| actcaggggt gtctggcagg ttgtgggggc tgctagggtg agggaagggt gggaaggaga | 1500 |
| cttgcatgag tctctttttg aaaaggctgg atgtaaatgg aatttgggaa gtaatcccag | 1560 |
| catcatagca gaagttggtt ggagaccatc cagccaaggt cctcaacctt gtgacttgtc | 1620 |
| ctcaaccttg gctgcatatt aaaaaagatg aatgcaggcc aagtgtagtg gctcacactt | 1680 |
| gtaatcccag agctttggga agctgaggta ggaggattgc ttgatgccag gagtccaaga | 1740 |
| ccagcctgga caacatagca agacccctgt ctctatgaaa ataaattagg ccaagagcag | 1800 |
| tgactcatac ctgtaatccc agcaccttgg gaggccaatg caggaggatc acttcagcca | 1860 |
| gtca | 1864 |
| <210> 12 | |
| <211> 1864 | |
| <212> DNA | |
| <213> Homo sapiens | |
| <400> 12 | |
| tgactggctg aagtgatcct cctgcattgg cctcccaagg tgctgggatt acaggtatga | 60 |
| gtcactgctc ttggcctaat ttattttcat agagacaggg gtcttgctat gttgtccagg | 120 |
| ctggtcttgg actcctggca tcaagcaatc ctcctacctc agcttcccaa agctctggga | 180 |
| ttacaagtgt gagccactac acttggcctg cattcatctt ttttaatatg cagccaaggt | 240 |
| tgaggacaag tcacaaggtt gaggaccttg gctggatggt ctccaaccaa cttctgctat | 300 |
| gatgctggga ttacttccca aattccattt acatccagcc ttttcaaaaa gagactcatg | 360 |
| caagtctcct tcccaccctt ccctcaccct agcagccccc acaacctgcc agacacccct | 420 |
| gagttggaag aaacctcaga gaacagttgt gtgccctcat tctgcagagg aaaagactgg | 480 |
| ggagccccag agaggagatg cttccacaca ggcttgccct gtggctgttt aagccctacc | 540 |
| caagccctct gggcattctt acacctatgc acccacctgg ggtggagaca ttctactcct | 600 |
| tgctcactgc tgaggcctgc actggagccc aaggctaggg gtctacttct ttgctttaac | 660 |
| ccccatcccc catcttcaaa caccaccaaa ccaggaacca ctattccaat tgtggtaggc | 720 |
| aggataaaag gattctggct ccctttaaga accaaattag ctggaagtgg caaagagagg | 780 |
| ctgaatgggg cacccaccac gtctccgtag ccaaacagct ggaagagctc ctctcgtggc | 840 |
| ttctccacct ccacggacac ccggatcttc tgctctggag gctgcctggt gttgtgtgcg | 900 |
| tctatccgct gcagcatctt cacctgctcc gatgcgttcc ggccctcaat gtggatccac | 960 |
| ttgaactggg tcagatcaac cttctcaaag tctgtagcag acacatctgg caggctcctg | 1020 |
| tcatagtata ggatggtgcg gctaccactg gcctcgttga tgatgaccgt ggcgatgggg | 1080 |
| acggagcctg tggtctgaaa gactgtgtag cgtaggtcca cagaatagcg gcggaggtca | 1140 |
| tccaggacaa aactgtcagc aacatggcca ggagccattg agcccatgaa ggcacagggg | 1200 |
| gctccgagca gggagagaac ggtgcaggag ttggacgcgt tgcctccgcg ctgccatctc | 1260 |
| tgggacaaac accttatctc cgagtcctcc ttagggtact tgtccaccag gctgatgacg | 1320 |
| tccagcacca ctagccccac gcacaggatc tgcttctctt ccatgaggct actcccagag | 1380 |
| cttcctgccc gcccggctga cggggttcct cccggcctct gcctcttatc caggaggatg | 1440 |
| gtgtccccgc tcccagctgc cctggctcct cctccgcgtg ggagctcctc ctccagggag | 1500 |
| ccacctgcag cggccagggg tgcagggaac gaaaggagca gggcccttcc tcgcgacacc | 1560 |
| cgaagacccg agcgggtcta ggaaagccaa cccagaggtc ttggtccccg gtcttcccgt | 1620 |
| agcaggttgc ctgggcctgc agatggcaac gcctcccact tctcagcctt agtttcctcg | 1680 |
| cttgtcagat ggactcacag ctgatgcaaa cctttttaaa gcgcggctaa gcgatctcga | 1740 |
| gaatgcaaag agaaaatgcg ctacttgccc cgcactctcc tgcacctgcg tctccgactc | 1800 |
| ccgacccggg acacgcgagg tacagctggg cctcgcatct gcagccctgc ctgaagcccg | 1860 |
| cggt | 1864 |
| <210> 13 | |
| <211> 1829 | |
| <212> DNA | |
| <213> Homo sapiens | |
| <400> 13 | |
| ggcccagctg tacctcgcgt gtcccgggtc gggagtcgga gacgcaggtg caggagagtg | 60 |
| cggggcaagt agcgcatttt ctctttgcat tctcgagatc gcttagccgc gctttaaaaa | 120 |
| ggtttgcatc agctgtgagt ccatctgaca agcgaggaaa ctaaggctga gaagtgggag | 180 |
| gcgttgccat ctgcaggccc aggcaacctg ctacgggaag accggggacc aagacctctg | 240 |
| ggttggcttt cctagacccg ctcgggtctt cgggtgtcgc gaggaagggc cctgctcctt | 300 |
| tcgttccctg cacccctggc cgctgcaggt ggctccctgg aggaggagct cccacgcgga | 360 |
| ggaggagcca gggcagctgg gagcggggac accatcctcc tggataagag gcagaggccg | 420 |
| ggaggaaccc cgtcagccgg gcgggcagga agctctggga gtagcctcat ggaagagaag | 480 |
| cagatcctgt gcgtggggct agtggtgctg gacgtcatca gcctggtgga caagtaccct | 540 |
| aaggaggact cggagataag gtgtttgtcc cagagatggc agcgcggagg caacgcgtcc | 600 |
| aactcctgca ccgttctctc cctgctcgga gccccctgtg ccttcatggg ctcaatggct | 660 |
| cctggccatg ttgctgactt cctggtggcc gacttcaggc ggcggggcgt ggacgtgtct | 720 |
| caggtggcct ggcagagcaa gggggacacc cccagctcct gctgcatcat caacaactcc | 780 |
| aatggcaacc gtaccattgt gctccatgac acgagcctgc cagatgtgtc tgctacagac | 840 |
| tttgagaagg ttgatctgac ccagttcaag tggatccaca ttgagggccg gaacgcatcg | 900 |
| gagcaggtga agatgctgca gcggatagac gcacacaaca ccaggcagcc tccagagcag | 960 |
| aagatccggg tgtccgtgga ggtggagaag ccacgagagg agctcttcca gctgtttggc | 1020 |
| tacggagacg tggtgggtgc cccattcagc ctctctttgc cacttccagc taatttggtt | 1080 |
| cttaaaggga gccagaatcc ttttatcctg cctaccacaa ttggaatagt ggttcctggt | 1140 |
| ttggtggtgt ttgaagatgg gggatggggg ttaaagcaaa gaagtagacc cctagccttg | 1200 |
| ggctccagtg caggcctcag cagtgagcaa ggagtagaat gtctccaccc caggtgggtg | 1260 |
| cataggtgta agaatgccca gagggcttgg gtagggctta aacagccaca gggcaagcct | 1320 |
| gtgtggaagc atctcctctc tggggctccc cagtcttttc ctctgcagaa tgagggcaca | 1380 |
| caactgttct ctgaggtttc ttccaactca ggggtgtctg gcaggttgtg ggggctgcta | 1440 |
| gggtgaggga agggtgggaa ggagacttgc atgagtctct ttttgaaaag gctggatgta | 1500 |
| aatggaattt gggaagtaat cccagcatca tagcagaagt tggttggaga ccatccagcc | 1560 |
| aaggtcctca accttgtgac ttgtcctcaa ccttggctgc atattaaaaa agatgaatgc | 1620 |
| aggccaagtg tagtggctca cacttgtaat cccagagctt tgggaagctg aggtaggagg | 1680 |
| attgcttgat gccaggagtc caagaccagc ctggacaaca tagcaagacc cctgtctcta | 1740 |
| tgaaaataaa ttaggccaag agcagtgact catacctgta atcccagcac cttgggaggc | 1800 |
| caatgcagga ggatcacttc agccagtca | 1829 |
| <210> 14 | |
| <211> 1829 | |
| <212> DNA | |
| <213> Homo sapiens | |
| <400> 14 | |
| tgactggctg aagtgatcct cctgcattgg cctcccaagg tgctgggatt acaggtatga | 60 |
| gtcactgctc ttggcctaat ttattttcat agagacaggg gtcttgctat gttgtccagg | 120 |
| ctggtcttgg actcctggca tcaagcaatc ctcctacctc agcttcccaa agctctggga | 180 |
| ttacaagtgt gagccactac acttggcctg cattcatctt ttttaatatg cagccaaggt | 240 |
| tgaggacaag tcacaaggtt gaggaccttg gctggatggt ctccaaccaa cttctgctat | 300 |
| gatgctggga ttacttccca aattccattt acatccagcc ttttcaaaaa gagactcatg | 360 |
| caagtctcct tcccaccctt ccctcaccct agcagccccc acaacctgcc agacacccct | 420 |
| gagttggaag aaacctcaga gaacagttgt gtgccctcat tctgcagagg aaaagactgg | 480 |
| ggagccccag agaggagatg cttccacaca ggcttgccct gtggctgttt aagccctacc | 540 |
| caagccctct gggcattctt acacctatgc acccacctgg ggtggagaca ttctactcct | 600 |
| tgctcactgc tgaggcctgc actggagccc aaggctaggg gtctacttct ttgctttaac | 660 |
| ccccatcccc catcttcaaa caccaccaaa ccaggaacca ctattccaat tgtggtaggc | 720 |
| aggataaaag gattctggct ccctttaaga accaaattag ctggaagtgg caaagagagg | 780 |
| ctgaatgggg cacccaccac gtctccgtag ccaaacagct ggaagagctc ctctcgtggc | 840 |
| ttctccacct ccacggacac ccggatcttc tgctctggag gctgcctggt gttgtgtgcg | 900 |
| tctatccgct gcagcatctt cacctgctcc gatgcgttcc ggccctcaat gtggatccac | 960 |
| ttgaactggg tcagatcaac cttctcaaag tctgtagcag acacatctgg caggctcgtg | 1020 |
| tcatggagca caatggtacg gttgccattg gagttgttga tgatgcagca ggagctgggg | 1080 |
| gtgtccccct tgctctgcca ggccacctga gacacgtcca cgccccgccg cctgaagtcg | 1140 |
| gccaccagga agtcagcaac atggccagga gccattgagc ccatgaaggc acagggggct | 1200 |
| ccgagcaggg agagaacggt gcaggagttg gacgcgttgc ctccgcgctg ccatctctgg | 1260 |
| gacaaacacc ttatctccga gtcctcctta gggtacttgt ccaccaggct gatgacgtcc | 1320 |
| agcaccacta gccccacgca caggatctgc ttctcttcca tgaggctact cccagagctt | 1380 |
| cctgcccgcc cggctgacgg ggttcctccc ggcctctgcc tcttatccag gaggatggtg | 1440 |
| tccccgctcc cagctgccct ggctcctcct ccgcgtggga gctcctcctc cagggagcca | 1500 |
| cctgcagcgg ccaggggtgc agggaacgaa aggagcaggg cccttcctcg cgacacccga | 1560 |
| agacccgagc gggtctagga aagccaaccc agaggtcttg gtccccggtc ttcccgtagc | 1620 |
| aggttgcctg ggcctgcaga tggcaacgcc tcccacttct cagccttagt ttcctcgctt | 1680 |
| gtcagatgga ctcacagctg atgcaaacct ttttaaagcg cggctaagcg atctcgagaa | 1740 |
| tgcaaagaga aaatgcgcta cttgccccgc actctcctgc acctgcgtct ccgactcccg | 1800 |
| acccgggaca cgcgaggtac agctgggcc | 1829 |
| <210> 15 | |
| <211> 1861 | |
| <212> DNA | |
| <213> Homo sapiens | |
| <400> 15 | |
| accgcgggct tcaggcaggg ctgcagatgc gaggcccagc tgtacctcgc gtgtcccggg | 60 |
| tcgggagtcg gagacgcagg tgcaggagag tgcggggcaa gtagcgcatt ttctctttgc | 120 |
| attctcgaga tcgcttagcc gcgctttaaa aaggtttgca tcagctgtga gtccatctga | 180 |
| caagcgagga aactaaggct gagaagtggg aggcgttgcc atctgcaggc ccaggcaacc | 240 |
| tgctacggga agaccgggga ccaagacctc tgggttggct ttcctagacc cgctcgggtc | 300 |
| ttcgggtgtc gcgaggaagg gccctgctcc tttcgttccc tgcacccctg gccgctgcag | 360 |
| gtggctccct ggaggaggag ctcccacgcg gaggaggagc cagggcagct gggagcgggg | 420 |
| acaccatcct cctggataag aggcagaggc cgggaggaac cccgtcagcc gggcgggcag | 480 |
| gaagctctgg gagtagcctc atggaagaga agcagatcct gtgcgtgggg ctagtggtgc | 540 |
| tggacgtcat cagcctggtg gacaagtacc ctaaggagga ctcggagata aggtgtttgt | 600 |
| cccagagatg gcagcgcgga ggcaacgcgt ccaactcctg caccgttctc tccctgctcg | 660 |
| gagccccctg tgccttcatg ggctcaatgg ctcctggcca tgttgctgat tttgtcctgg | 720 |
| atgacctccg ccgctattct gtggacctac gctacacagt ctttcagacc acaggctccg | 780 |
| tccccatcgc cacggtcatc atcaacgagg ccagtggtag ccgcaccatc ctatactatg | 840 |
| acaggagcct gccagatgtg tctgctacag actttgagaa ggttgatctg acccagttca | 900 |
| agtggatcca cattgagggc cggaacgcat cggagcaggt gaagatgctg cagcggatag | 960 |
| acgcacacaa caccaggcag cctccagagc agaagatccg ggtgtccgtg gaggtggaga | 1020 |
| agccacgaga ggagctcttc cagctgtttg gctacggaga cgtggtgggt gccccattca | 1080 |
| gcctctcttt gccacttcca gctaatttgg ttcttaaagg gagccagaat ccttttatcc | 1140 |
| tgcctaccac aattggaata gtggttcctg gtttggtggt gtttgaagat gggggatggg | 1200 |
| ggttaaagca aagaagtaga cccctagcct tgggctccag tgcaggcctc agcagtgagc | 1260 |
| aaggagtaga atgtctccac cccaggtggg tgcataggtg taagaatgcc cagagggctt | 1320 |
| gggtagggct taaacagcca cagggcaagc ctgtgtggaa gcatctcctc tctggggctc | 1380 |
| cccagtcttt tcctctgcag aatgagggca cacaactgtt ctctgaggtt tcttccaact | 1440 |
| caggggtgtc tggcaggttg tgggggctgc tagggtgagg gaagggtggg aaggagactt | 1500 |
| gcatgagtct ctttttgaaa aggctggatg taaatggaat ttgggaagta atcccagcat | 1560 |
| catagcagaa gttggttgga gaccatccag ccaaggtcct caaccttgtg acttgtcctc | 1620 |
| aaccttggct gcatattaaa aaagatgaat gcaggccaag tgtagtggct cacacttgta | 1680 |
| atcccagagc tttgggaagc tgaggtagga ggattgcttg atgccaggag tccaagacca | 1740 |
| gcctggacaa catagcaaga cccctgtctc tatgaaaata aattaggcca agagcagtga | 1800 |
| ctcatacctg taatcccagc accttgggag gccaatgcag gaggatcact tcagccagtc | 1860 |
| a | 1861 |
| <210> 16 | |
| <211> 1861 | |
| <212> DNA | |
| <213> Homo sapiens | |
| <400> 16 | |
| tgactggctg aagtgatcct cctgcattgg cctcccaagg tgctgggatt acaggtatga | 60 |
| gtcactgctc ttggcctaat ttattttcat agagacaggg gtcttgctat gttgtccagg | 120 |
| ctggtcttgg actcctggca tcaagcaatc ctcctacctc agcttcccaa agctctggga | 180 |
| ttacaagtgt gagccactac acttggcctg cattcatctt ttttaatatg cagccaaggt | 240 |
| tgaggacaag tcacaaggtt gaggaccttg gctggatggt ctccaaccaa cttctgctat | 300 |
| gatgctggga ttacttccca aattccattt acatccagcc ttttcaaaaa gagactcatg | 360 |
| caagtctcct tcccaccctt ccctcaccct agcagccccc acaacctgcc agacacccct | 420 |
| gagttggaag aaacctcaga gaacagttgt gtgccctcat tctgcagagg aaaagactgg | 480 |
| ggagccccag agaggagatg cttccacaca ggcttgccct gtggctgttt aagccctacc | 540 |
| caagccctct gggcattctt acacctatgc acccacctgg ggtggagaca ttctactcct | 600 |
| tgctcactgc tgaggcctgc actggagccc aaggctaggg gtctacttct ttgctttaac | 660 |
| ccccatcccc catcttcaaa caccaccaaa ccaggaacca ctattccaat tgtggtaggc | 720 |
| aggataaaag gattctggct ccctttaaga accaaattag ctggaagtgg caaagagagg | 780 |
| ctgaatgggg cacccaccac gtctccgtag ccaaacagct ggaagagctc ctctcgtggc | 840 |
| ttctccacct ccacggacac ccggatcttc tgctctggag gctgcctggt gttgtgtgcg | 900 |
| tctatccgct gcagcatctt cacctgctcc gatgcgttcc ggccctcaat gtggatccac | 960 |
| ttgaactggg tcagatcaac cttctcaaag tctgtagcag acacatctgg caggctcctg | 1020 |
| tcatagtata ggatggtgcg gctaccactg gcctcgttga tgatgaccgt ggcgatgggg | 1080 |
| acggagcctg tggtctgaaa gactgtgtag cgtaggtcca cagaatagcg gcggaggtca | 1140 |
| tccaggacaa aatcagcaac atggccagga gccattgagc ccatgaaggc acagggggct | 1200 |
| ccgagcaggg agagaacggt gcaggagttg gacgcgttgc ctccgcgctg ccatctctgg | 1260 |
| gacaaacacc ttatctccga gtcctcctta gggtacttgt ccaccaggct gatgacgtcc | 1320 |
| agcaccacta gccccacgca caggatctgc ttctcttcca tgaggctact cccagagctt | 1380 |
| cctgcccgcc cggctgacgg ggttcctccc ggcctctgcc tcttatccag gaggatggtg | 1440 |
| tccccgctcc cagctgccct ggctcctcct ccgcgtggga gctcctcctc cagggagcca | 1500 |
| cctgcagcgg ccaggggtgc agggaacgaa aggagcaggg cccttcctcg cgacacccga | 1560 |
| agacccgagc gggtctagga aagccaaccc agaggtcttg gtccccggtc ttcccgtagc | 1620 |
| aggttgcctg ggcctgcaga tggcaacgcc tcccacttct cagccttagt ttcctcgctt | 1680 |
| gtcagatgga ctcacagctg atgcaaacct ttttaaagcg cggctaagcg atctcgagaa | 1740 |
| tgcaaagaga aaatgcgcta cttgccccgc actctcctgc acctgcgtct ccgactcccg | 1800 |
| acccgggaca cgcgaggtac agctgggcct cgcatctgca gccctgcctg aagcccgcgg | 1860 |
| t | 1861 |
| <210> 17 | |
| <211> 2387 | |
| <212> DNA | |
| <213> Homo sapiens | |
| <400> 17 | |
| aggcagggct gcagatgcga ggcccagctg tacctcgcgt gtcccgggtc gggagtcgga | 60 |
| gacgcaggtg caggagagtg cggggcaagt agcgcatttt ctctttgcat tctcgagatc | 120 |
| gcttagccgc gctttaaaaa ggtttgcatc agctgtgagt ccatctgaca agcgaggaaa | 180 |
| ctaaggctga gaagtgggag gcgttgccat ctgcaggccc aggcaacctg ctacgggaag | 240 |
| accggggacc aagacctctg ggttggcttt cctagacccg ctcgggtctt cgggtgtcgc | 300 |
| gaggaagggc cctgctcctt tcgttccctg cacccctggc cgctgcaggt ggctccctgg | 360 |
| aggaggagct cccacgcgga ggaggagcca gggcagctgg gagcggggac accatcctcc | 420 |
| tggataagag gcagaggccg ggaggaaccc cgtcagccgg gcgggcagga agctctggga | 480 |
| gtagcctcat ggaagagaag cagatcctgt gcgtggggct agtggtgctg gacgtcatca | 540 |
| gcctggtgga caagtaccct aaggaggact cggagataag gtgtttgtcc cagagatggc | 600 |
| agcgcggagg caacgcgtcc aactcctgca ccgttctctc cctgctcgga gccccctgtg | 660 |
| ccttcatggg ctcaatggct cctggccatg ttgctgacag ttttgtcctg gatgacctcc | 720 |
| gccgctattc tgtggaccta cgctacacag tctttcagac cacaggctcc gtccccatcg | 780 |
| ccacggtcat catcaacgag gccagtggta gccgcaccat cctatactat gacaggagcc | 840 |
| tgccagatgt gtctgctaca gactttgaga aggttgatct gacccagttc aagtggatcc | 900 |
| acattgaggg ccggaacgca tcggagcagg tgaagatgct gcagcggata gacgcacaca | 960 |
| acaccaggca gcctccagag cagaagatcc gggtgtccgt ggaggtggag aagccacgag | 1020 |
| aggagctctt ccagctgttt ggctacggag acgtggtgtt tgtcagcaaa gatgtggcca | 1080 |
| agcacttggg gttccagtca gcagaggaag ccttgagggg cttgtatggt cgtgtgagga | 1140 |
| aaggggctgt gcttgtctgt gcctgggctg aggagggcgc cgacgccctg ggccctgatg | 1200 |
| gcaaattgct ccactcggat gctttcccgc caccccgcgt ggtggataca ctgggagctg | 1260 |
| gagacacctt caatgcctcc gtcatcttca gcctctccca ggggaggagc gtgcaggaag | 1320 |
| cactgagatt cgggtgccag gtggccggca agaagtgtgg cctgcagggc tttgatggca | 1380 |
| tcgtgtgaga gcaggtgccg gctcctcaca caccatggag actaccattg cggctgcatc | 1440 |
| gccttctccc ctccatccag cctggcgtcc aggttgccct gttcagggga cagatgcaag | 1500 |
| ctgtggggag gactctgcct gtgtcctgtg ttccccacag ggagaggctc tggggggatg | 1560 |
| gctgggggat gcagagcctc agagcaaata aatcttcctc agagccagct tctcctctca | 1620 |
| atgtctgaac tgctctggct gggcattcct gaggctctga ctcttcgatc ctccctcttt | 1680 |
| gtgtccattc cccaaattaa cctctccgcc caggcccaga ggaggggctg cctgggctag | 1740 |
| agcagcgaga agtgccctgg gcttgccacc agctctgccc tggctgggga ggacactcgg | 1800 |
| tgccccacac ccagtgaacc tgccaaagaa accgtgagag ctcttcgggg ccctgcgttg | 1860 |
| tgcagactct attcccacag ctcagaagct gggagtccac accgctgagc tgaactgaca | 1920 |
| ggccagtggg gggcaggggt gcgcctcctc tgccctgccc accagcctgt gatttgatgg | 1980 |
| ggtcttcatt gtccagaaat acctcctccc gctgactgcc ccagagcctg aaagtctcac | 2040 |
| ccttggagcc caccttggaa ttaagggcgt gcctcagcca caaatgtgac ccaggataca | 2100 |
| gagtgttgct gtcctcaggg aggtccgatc tggaacacat attggaattg gggccaactc | 2160 |
| caatataggg tgggtaaggc cttataatgt aaagagcata taatgtaaag ggctttagag | 2220 |
| tgagacagac ctggattaaa atctgccatt taattagctg catatcacct tagggtacag | 2280 |
| cacttaacgc aatctgcctc aatttcttca tctgtcaaat ggaaccaatt ctgcttggct | 2340 |
| acagaattat tgtgaggata aaatcatata taaaatgccc agcatga | 2387 |
| <210> 18 | |
| <211> 2387 | |
| <212> DNA | |
| <213> Homo sapiens | |
| <400> 18 | |
| tcatgctggg cattttatat atgattttat cctcacaata attctgtagc caagcagaat | 60 |
| tggttccatt tgacagatga agaaattgag gcagattgcg ttaagtgctg taccctaagg | 120 |
| tgatatgcag ctaattaaat ggcagatttt aatccaggtc tgtctcactc taaagccctt | 180 |
| tacattatat gctctttaca ttataaggcc ttacccaccc tatattggag ttggccccaa | 240 |
| ttccaatatg tgttccagat cggacctccc tgaggacagc aacactctgt atcctgggtc | 300 |
| acatttgtgg ctgaggcacg cccttaattc caaggtgggc tccaagggtg agactttcag | 360 |
| gctctggggc agtcagcggg aggaggtatt tctggacaat gaagacccca tcaaatcaca | 420 |
| ggctggtggg cagggcagag gaggcgcacc cctgcccccc actggcctgt cagttcagct | 480 |
| cagcggtgtg gactcccagc ttctgagctg tgggaataga gtctgcacaa cgcagggccc | 540 |
| cgaagagctc tcacggtttc tttggcaggt tcactgggtg tggggcaccg agtgtcctcc | 600 |
| ccagccaggg cagagctggt ggcaagccca gggcacttct cgctgctcta gcccaggcag | 660 |
| cccctcctct gggcctgggc ggagaggtta atttggggaa tggacacaaa gagggaggat | 720 |
| cgaagagtca gagcctcagg aatgcccagc cagagcagtt cagacattga gaggagaagc | 780 |
| tggctctgag gaagatttat ttgctctgag gctctgcatc ccccagccat ccccccagag | 840 |
| cctctccctg tggggaacac aggacacagg cagagtcctc cccacagctt gcatctgtcc | 900 |
| cctgaacagg gcaacctgga cgccaggctg gatggagggg agaaggcgat gcagccgcaa | 960 |
| tggtagtctc catggtgtgt gaggagccgg cacctgctct cacacgatgc catcaaagcc | 1020 |
| ctgcaggcca cacttcttgc cggccacctg gcacccgaat ctcagtgctt cctgcacgct | 1080 |
| cctcccctgg gagaggctga agatgacgga ggcattgaag gtgtctccag ctcccagtgt | 1140 |
| atccaccacg cggggtggcg ggaaagcatc cgagtggagc aatttgccat cagggcccag | 1200 |
| ggcgtcggcg ccctcctcag cccaggcaca gacaagcaca gcccctttcc tcacacgacc | 1260 |
| atacaagccc ctcaaggctt cctctgctga ctggaacccc aagtgcttgg ccacatcttt | 1320 |
| gctgacaaac accacgtctc cgtagccaaa cagctggaag agctcctctc gtggcttctc | 1380 |
| cacctccacg gacacccgga tcttctgctc tggaggctgc ctggtgttgt gtgcgtctat | 1440 |
| ccgctgcagc atcttcacct gctccgatgc gttccggccc tcaatgtgga tccacttgaa | 1500 |
| ctgggtcaga tcaaccttct caaagtctgt agcagacaca tctggcaggc tcctgtcata | 1560 |
| gtataggatg gtgcggctac cactggcctc gttgatgatg accgtggcga tggggacgga | 1620 |
| gcctgtggtc tgaaagactg tgtagcgtag gtccacagaa tagcggcgga ggtcatccag | 1680 |
| gacaaaactg tcagcaacat ggccaggagc cattgagccc atgaaggcac agggggctcc | 1740 |
| gagcagggag agaacggtgc aggagttgga cgcgttgcct ccgcgctgcc atctctggga | 1800 |
| caaacacctt atctccgagt cctccttagg gtacttgtcc accaggctga tgacgtccag | 1860 |
| caccactagc cccacgcaca ggatctgctt ctcttccatg aggctactcc cagagcttcc | 1920 |
| tgcccgcccg gctgacgggg ttcctcccgg cctctgcctc ttatccagga ggatggtgtc | 1980 |
| cccgctccca gctgccctgg ctcctcctcc gcgtgggagc tcctcctcca gggagccacc | 2040 |
| tgcagcggcc aggggtgcag ggaacgaaag gagcagggcc cttcctcgcg acacccgaag | 2100 |
| acccgagcgg gtctaggaaa gccaacccag aggtcttggt ccccggtctt cccgtagcag | 2160 |
| gttgcctggg cctgcagatg gcaacgcctc ccacttctca gccttagttt cctcgcttgt | 2220 |
| cagatggact cacagctgat gcaaaccttt ttaaagcgcg gctaagcgat ctcgagaatg | 2280 |
| caaagagaaa atgcgctact tgccccgcac tctcctgcac ctgcgtctcc gactcccgac | 2340 |
| ccgggacacg cgaggtacag ctgggcctcg catctgcagc cctgcct | 2387 |
| <210> 19 | |
| <211> 1726 | |
| <212> DNA | |
| <213> Homo sapiens | |
| <400> 19 | |
| accgcgggct tcaggcaggg ctgcagatgc gaggcccagc tgtacctcgc gtgtcccggg | 60 |
| tcgggagtcg gagacgcagg tgcaggagag tgcggggcaa gtagcgcatt ttctctttgc | 120 |
| attctcgaga tcgcttagcc gcgctttaaa aaggtttgca tcagctgtga gtccatctga | 180 |
| caagcgagga aactaaggct gagaagtggg aggcgttgcc atctgcaggc ccaggcaacc | 240 |
| tgctacggga agaccgggga ccaagacctc tgggttggct ttcctagacc cgctcgggtc | 300 |
| ttcgggtgtc gcgaggaagg gccctgctcc tttcgttccc tgcacccctg gccgctgcag | 360 |
| gtggctccct ggaggaggag ctcccacgcg gaggaggagc cagggcagct gggagcgggg | 420 |
| acaccatcct cctggataag aggcagaggc cgggaggaac cccgtcagcc gggcgggcag | 480 |
| gaagctctgg gagtagcctc atggaagaga agcagatcct gtgcgtgggg ctagtggtgc | 540 |
| tggacgtcat cagcctggtg gacaagtacc ctaaggagga ctcggagata aggtgtttgt | 600 |
| cccagagatg gcagcgcgga ggcaacgcgt ccaactcctg caccgttctc tccctgctcg | 660 |
| gagccccctg tgccttcatg ggctcaatgg ctcctggcca tgttgctgag agcctgccag | 720 |
| atgtgtctgc tacagacttt gagaaggttg atctgaccca gttcaagtgg atccacattg | 780 |
| agggccggaa cgcatcggag caggtgaaga tgctgcagcg gatagacgca cacaacacca | 840 |
| ggcagcctcc agagcagaag atccgggtgt ccgtggaggt ggagaagcca cgagaggagc | 900 |
| tcttccagct gtttggctac ggagacgtgg tgggtgcccc attcagcctc tctttgccac | 960 |
| ttccagctaa tttggttctt aaagggagcc agaatccttt tatcctgcct accacaattg | 1020 |
| gaatagtggt tcctggtttg gtggtgtttg aagatggggg atgggggtta aagcaaagaa | 1080 |
| gtagacccct agccttgggc tccagtgcag gcctcagcag tgagcaagga gtagaatgtc | 1140 |
| tccaccccag gtgggtgcat aggtgtaaga atgcccagag ggcttgggta gggcttaaac | 1200 |
| agccacaggg caagcctgtg tggaagcatc tcctctctgg ggctccccag tcttttcctc | 1260 |
| tgcagaatga gggcacacaa ctgttctctg aggtttcttc caactcaggg gtgtctggca | 1320 |
| ggttgtgggg gctgctaggg tgagggaagg gtgggaagga gacttgcatg agtctctttt | 1380 |
| tgaaaaggct ggatgtaaat ggaatttggg aagtaatccc agcatcatag cagaagttgg | 1440 |
| ttggagacca tccagccaag gtcctcaacc ttgtgacttg tcctcaacct tggctgcata | 1500 |
| ttaaaaaaga tgaatgcagg ccaagtgtag tggctcacac ttgtaatccc agagctttgg | 1560 |
| gaagctgagg taggaggatt gcttgatgcc aggagtccaa gaccagcctg gacaacatag | 1620 |
| caagacccct gtctctatga aaataaatta ggccaagagc agtgactcat acctgtaatc | 1680 |
| ccagcacctt gggaggccaa tgcaggagga tcacttcagc cagtca | 1726 |
| <210> 20 | |
| <211> 1726 | |
| <212> DNA | |
| <213> Homo sapiens | |
| <400> 20 | |
| tgactggctg aagtgatcct cctgcattgg cctcccaagg tgctgggatt acaggtatga | 60 |
| gtcactgctc ttggcctaat ttattttcat agagacaggg gtcttgctat gttgtccagg | 120 |
| ctggtcttgg actcctggca tcaagcaatc ctcctacctc agcttcccaa agctctggga | 180 |
| ttacaagtgt gagccactac acttggcctg cattcatctt ttttaatatg cagccaaggt | 240 |
| tgaggacaag tcacaaggtt gaggaccttg gctggatggt ctccaaccaa cttctgctat | 300 |
| gatgctggga ttacttccca aattccattt acatccagcc ttttcaaaaa gagactcatg | 360 |
| caagtctcct tcccaccctt ccctcaccct agcagccccc acaacctgcc agacacccct | 420 |
| gagttggaag aaacctcaga gaacagttgt gtgccctcat tctgcagagg aaaagactgg | 480 |
| ggagccccag agaggagatg cttccacaca ggcttgccct gtggctgttt aagccctacc | 540 |
| caagccctct gggcattctt acacctatgc acccacctgg ggtggagaca ttctactcct | 600 |
| tgctcactgc tgaggcctgc actggagccc aaggctaggg gtctacttct ttgctttaac | 660 |
| ccccatcccc catcttcaaa caccaccaaa ccaggaacca ctattccaat tgtggtaggc | 720 |
| aggataaaag gattctggct ccctttaaga accaaattag ctggaagtgg caaagagagg | 780 |
| ctgaatgggg cacccaccac gtctccgtag ccaaacagct ggaagagctc ctctcgtggc | 840 |
| ttctccacct ccacggacac ccggatcttc tgctctggag gctgcctggt gttgtgtgcg | 900 |
| tctatccgct gcagcatctt cacctgctcc gatgcgttcc ggccctcaat gtggatccac | 960 |
| ttgaactggg tcagatcaac cttctcaaag tctgtagcag acacatctgg caggctctca | 1020 |
| gcaacatggc caggagccat tgagcccatg aaggcacagg gggctccgag cagggagaga | 1080 |
| acggtgcagg agttggacgc gttgcctccg cgctgccatc tctgggacaa acaccttatc | 1140 |
| tccgagtcct ccttagggta cttgtccacc aggctgatga cgtccagcac cactagcccc | 1200 |
| acgcacagga tctgcttctc ttccatgagg ctactcccag agcttcctgc ccgcccggct | 1260 |
| gacggggttc ctcccggcct ctgcctctta tccaggagga tggtgtcccc gctcccagct | 1320 |
| gccctggctc ctcctccgcg tgggagctcc tcctccaggg agccacctgc agcggccagg | 1380 |
| ggtgcaggga acgaaaggag cagggccctt cctcgcgaca cccgaagacc cgagcgggtc | 1440 |
| taggaaagcc aacccagagg tcttggtccc cggtcttccc gtagcaggtt gcctgggcct | 1500 |
| gcagatggca acgcctccca cttctcagcc ttagtttcct cgcttgtcag atggactcac | 1560 |
| agctgatgca aaccttttta aagcgcggct aagcgatctc gagaatgcaa agagaaaatg | 1620 |
| cgctacttgc cccgcactct cctgcacctg cgtctccgac tcccgacccg ggacacgcga | 1680 |
| ggtacagctg ggcctcgcat ctgcagccct gcctgaagcc cgcggt | 1726 |
| <210> 21 | |
| <211> 1609 | |
| <212> DNA | |
| <213> Homo sapiens | |
| <400> 21 | |
| accgcgggct tcaggcaggg ctgcagatgc gaggcccagc tgtacctcgc gtgtcccggg | 60 |
| tcgggagtcg gagacgcagg tgcaggagag tgcggggcaa gtagcgcatt ttctctttgc | 120 |
| attctcgaga tcgcttagcc gcgctttaaa aaggtttgca tcagctgtga gtccatctga | 180 |
| caagcgagga aactaaggct gagaagtggg aggcgttgcc atctgcaggc ccaggcaacc | 240 |
| tgctacggga agaccgggga ccaagacctc tgggttggct ttcctagacc cgctcgggtc | 300 |
| ttcgggtgtc gcgaggaagg gccctgctcc tttcgttccc tgcacccctg gccgctgcag | 360 |
| gtggctccct ggaggaggag ctcccacgcg gaggaggagc cagggcagct gggagcgggg | 420 |
| acaccatcct cctggataag aggcagaggc cgggaggaac cccgtcagcc gggcgggcag | 480 |
| gaagctctgg gagtagcctc atggaagaga agcagatcct gtgcgtgggg ctagtggtgc | 540 |
| tggacgtcat cagcctggtg gacaagtacc ctaaggagga ctcggagata aggagcctgc | 600 |
| cagatgtgtc tgctacagac tttgagaagg ttgatctgac ccagttcaag tggatccaca | 660 |
| ttgagggccg gaacgcatcg gagcaggtga agatgctgca gcggatagac gcacacaaca | 720 |
| ccaggcagcc tccagagcag aagatccggg tgtccgtgga ggtggagaag ccacgagagg | 780 |
| agctcttcca gctgtttggc tacggagacg tggtgggtgc cccattcagc ctctctttgc | 840 |
| cacttccagc taatttggtt cttaaaggga gccagaatcc ttttatcctg cctaccacaa | 900 |
| ttggaatagt ggttcctggt ttggtggtgt ttgaagatgg gggatggggg ttaaagcaaa | 960 |
| gaagtagacc cctagccttg ggctccagtg caggcctcag cagtgagcaa ggagtagaat | 1020 |
| gtctccaccc caggtgggtg cataggtgta agaatgccca gagggcttgg gtagggctta | 1080 |
| aacagccaca gggcaagcct gtgtggaagc atctcctctc tggggctccc cagtcttttc | 1140 |
| ctctgcagaa tgagggcaca caactgttct ctgaggtttc ttccaactca ggggtgtctg | 1200 |
| gcaggttgtg ggggctgcta gggtgaggga agggtgggaa ggagacttgc atgagtctct | 1260 |
| ttttgaaaag gctggatgta aatggaattt gggaagtaat cccagcatca tagcagaagt | 1320 |
| tggttggaga ccatccagcc aaggtcctca accttgtgac ttgtcctcaa ccttggctgc | 1380 |
| atattaaaaa agatgaatgc aggccaagtg tagtggctca cacttgtaat cccagagctt | 1440 |
| tgggaagctg aggtaggagg attgcttgat gccaggagtc caagaccagc ctggacaaca | 1500 |
| tagcaagacc cctgtctcta tgaaaataaa ttaggccaag agcagtgact catacctgta | 1560 |
| atcccagcac cttgggaggc caatgcagga ggatcacttc agccagtca | 1609 |
| <210> 22 | |
| <211> 1609 | |
| <212> DNA | |
| <213> Homo sapiens | |
| <400> 22 | |
| tgactggctg aagtgatcct cctgcattgg cctcccaagg tgctgggatt acaggtatga | 60 |
| gtcactgctc ttggcctaat ttattttcat agagacaggg gtcttgctat gttgtccagg | 120 |
| ctggtcttgg actcctggca tcaagcaatc ctcctacctc agcttcccaa agctctggga | 180 |
| ttacaagtgt gagccactac acttggcctg cattcatctt ttttaatatg cagccaaggt | 240 |
| tgaggacaag tcacaaggtt gaggaccttg gctggatggt ctccaaccaa cttctgctat | 300 |
| gatgctggga ttacttccca aattccattt acatccagcc ttttcaaaaa gagactcatg | 360 |
| caagtctcct tcccaccctt ccctcaccct agcagccccc acaacctgcc agacacccct | 420 |
| gagttggaag aaacctcaga gaacagttgt gtgccctcat tctgcagagg aaaagactgg | 480 |
| ggagccccag agaggagatg cttccacaca ggcttgccct gtggctgttt aagccctacc | 540 |
| caagccctct gggcattctt acacctatgc acccacctgg ggtggagaca ttctactcct | 600 |
| tgctcactgc tgaggcctgc actggagccc aaggctaggg gtctacttct ttgctttaac | 660 |
| ccccatcccc catcttcaaa caccaccaaa ccaggaacca ctattccaat tgtggtaggc | 720 |
| aggataaaag gattctggct ccctttaaga accaaattag ctggaagtgg caaagagagg | 780 |
| ctgaatgggg cacccaccac gtctccgtag ccaaacagct ggaagagctc ctctcgtggc | 840 |
| ttctccacct ccacggacac ccggatcttc tgctctggag gctgcctggt gttgtgtgcg | 900 |
| tctatccgct gcagcatctt cacctgctcc gatgcgttcc ggccctcaat gtggatccac | 960 |
| ttgaactggg tcagatcaac cttctcaaag tctgtagcag acacatctgg caggctcctt | 1020 |
| atctccgagt cctccttagg gtacttgtcc accaggctga tgacgtccag caccactagc | 1080 |
| cccacgcaca ggatctgctt ctcttccatg aggctactcc cagagcttcc tgcccgcccg | 1140 |
| gctgacgggg ttcctcccgg cctctgcctc ttatccagga ggatggtgtc cccgctccca | 1200 |
| gctgccctgg ctcctcctcc gcgtgggagc tcctcctcca gggagccacc tgcagcggcc | 1260 |
| aggggtgcag ggaacgaaag gagcagggcc cttcctcgcg acacccgaag acccgagcgg | 1320 |
| gtctaggaaa gccaacccag aggtcttggt ccccggtctt cccgtagcag gttgcctggg | 1380 |
| cctgcagatg gcaacgcctc ccacttctca gccttagttt cctcgcttgt cagatggact | 1440 |
| cacagctgat gcaaaccttt ttaaagcgcg gctaagcgat ctcgagaatg caaagagaaa | 1500 |
| atgcgctact tgccccgcac tctcctgcac ctgcgtctcc gactcccgac ccgggacacg | 1560 |
| cgaggtacag ctgggcctcg catctgcagc cctgcctgaa gcccgcggt | 1609 |
| <210> 23 | |
| <211> 2144 | |
| <212> DNA | |
| <213> Homo sapiens | |
| <400> 23 | |
| accgcgggct tcaggcaggg ctgcagatgc gaggcccagc tgtacctcgc gtgtcccggg | 60 |
| tcgggagtcg gagacgcagg tgcaggagag tgcggggcaa gtagcgcatt ttctctttgc | 120 |
| attctcgaga tcgcttagcc gcgctttaaa aaggtttgca tcagctgtga gtccatctga | 180 |
| caagcgagga aactaaggct gagaagtggg aggcgttgcc atctgcaggc ccaggcaacc | 240 |
| tgctacggga agaccgggga ccaagacctc tgggttggct ttcctagacc cgctcgggtc | 300 |
| ttcgggtgtc gcgaggaagg gccctgctcc tttcgttccc tgcacccctg gccgctgcag | 360 |
| gtggctccct ggaggaggag ctcccacgcg gaggaggagc cagggcagct gggagcgggg | 420 |
| acaccatcct cctggataag aggcagaggc cgggaggaac cccgtcagcc gggcgggcag | 480 |
| gaagctctgg gagtagcctc atggaagaga agcagatcct gtgcgtgggg ctagtggtgc | 540 |
| tggacgtcat cagcctggtg gacaagtacc ctaaggagga ctcggagata aggagcctgc | 600 |
| cagatgtgtc tgctacagac tttgagaagg ttgatctgac ccagttcaag tggatccaca | 660 |
| ttgagggccg gaacgcatcg gagcaggtga agatgctgca gcggatagac gcacacaaca | 720 |
| ccaggcagcc tccagagcag aagatccggg tgtccgtgga ggtggagaag ccacgagagg | 780 |
| agctcttcca gctgtttggc tacggagacg tggtgtttgt cagcaaagat gtggccaagc | 840 |
| acttggggtt ccagtcagca gaggaagcct tgaggggctt gtatggtcgt gtgaggaaag | 900 |
| gggctgtgct tgtctgtgcc tgggctgagg agggcgccga cgccctgggc cctgatggca | 960 |
| aattgctcca ctcggatgct ttcccgccac cccgcgtggt ggatacactg ggagctggag | 1020 |
| acaccttcaa tgcctccgtc atcttcagcc tctcccaggg gaggagcgtg caggaagcac | 1080 |
| tgagattcgg gtgccaggtg gccggcaaga agtgtggcct gcagggcttt gatggcatcg | 1140 |
| tgtgagagca ggtgccggct cctcacacac catggagact accattgcgg ctgcatcgcc | 1200 |
| ttctcccctc catccagcct ggcgtccagg ttgccctgtt caggggacag atgcaagctg | 1260 |
| tggggaggac tctgcctgtg tcctgtgttc cccacaggga gaggctctgg ggggatggct | 1320 |
| gggggatgca gagcctcaga gcaaataaat cttcctcaga gccagcttct cctctcaatg | 1380 |
| tctgaactgc tctggctggg cattcctgag gctctgactc ttcgatcctc cctctttgtg | 1440 |
| tccattcccc aaattaacct ctccgcccag gcccagagga ggggctgcct gggctagagc | 1500 |
| agcgagaagt gccctgggct tgccaccagc tctgccctgg ctggggagga cactcggtgc | 1560 |
| cccacaccca gtgaacctgc caaagaaacc gtgagagctc ttcggggccc tgcgttgtgc | 1620 |
| agactctatt cccacagctc agaagctggg agtccacacc gctgagctga actgacaggc | 1680 |
| cagtgggggg caggggtgcg cctcctctgc cctgcccacc agcctgtgat ttgatggggt | 1740 |
| cttcattgtc cagaaatacc tcctcccgct gactgcccca gagcctgaaa gtctcaccct | 1800 |
| tggagcccac cttggaatta agggcgtgcc tcagccacaa atgtgaccca ggatacagag | 1860 |
| tgttgctgtc ctcagggagg tccgatctgg aacacatatt ggaattgggg ccaactccaa | 1920 |
| tatagggtgg gtaaggcctt ataatgtaaa gagcatataa tgtaaagggc tttagagtga | 1980 |
| gacagacctg gattaaaatc tgccatttaa ttagctgcat atcaccttag ggtacagcac | 2040 |
| ttaacgcaat ctgcctcaat ttcttcatct gtcaaatgga accaattctg cttggctaca | 2100 |
| gaattattgt gaggataaaa tcatatataa aatgcccagc atga | 2144 |
| <210> 24 | |
| <211> 2144 | |
| <212> DNA | |
| <213> Homo sapiens | |
| <400> 24 | |
| tcatgctggg cattttatat atgattttat cctcacaata attctgtagc caagcagaat | 60 |
| tggttccatt tgacagatga agaaattgag gcagattgcg ttaagtgctg taccctaagg | 120 |
| tgatatgcag ctaattaaat ggcagatttt aatccaggtc tgtctcactc taaagccctt | 180 |
| tacattatat gctctttaca ttataaggcc ttacccaccc tatattggag ttggccccaa | 240 |
| ttccaatatg tgttccagat cggacctccc tgaggacagc aacactctgt atcctgggtc | 300 |
| acatttgtgg ctgaggcacg cccttaattc caaggtgggc tccaagggtg agactttcag | 360 |
| gctctggggc agtcagcggg aggaggtatt tctggacaat gaagacccca tcaaatcaca | 420 |
| ggctggtggg cagggcagag gaggcgcacc cctgcccccc actggcctgt cagttcagct | 480 |
| cagcggtgtg gactcccagc ttctgagctg tgggaataga gtctgcacaa cgcagggccc | 540 |
| cgaagagctc tcacggtttc tttggcaggt tcactgggtg tggggcaccg agtgtcctcc | 600 |
| ccagccaggg cagagctggt ggcaagccca gggcacttct cgctgctcta gcccaggcag | 660 |
| cccctcctct gggcctgggc ggagaggtta atttggggaa tggacacaaa gagggaggat | 720 |
| cgaagagtca gagcctcagg aatgcccagc cagagcagtt cagacattga gaggagaagc | 780 |
| tggctctgag gaagatttat ttgctctgag gctctgcatc ccccagccat ccccccagag | 840 |
| cctctccctg tggggaacac aggacacagg cagagtcctc cccacagctt gcatctgtcc | 900 |
| cctgaacagg gcaacctgga cgccaggctg gatggagggg agaaggcgat gcagccgcaa | 960 |
| tggtagtctc catggtgtgt gaggagccgg cacctgctct cacacgatgc catcaaagcc | 1020 |
| ctgcaggcca cacttcttgc cggccacctg gcacccgaat ctcagtgctt cctgcacgct | 1080 |
| cctcccctgg gagaggctga agatgacgga ggcattgaag gtgtctccag ctcccagtgt | 1140 |
| atccaccacg cggggtggcg ggaaagcatc cgagtggagc aatttgccat cagggcccag | 1200 |
| ggcgtcggcg ccctcctcag cccaggcaca gacaagcaca gcccctttcc tcacacgacc | 1260 |
| atacaagccc ctcaaggctt cctctgctga ctggaacccc aagtgcttgg ccacatcttt | 1320 |
| gctgacaaac accacgtctc cgtagccaaa cagctggaag agctcctctc gtggcttctc | 1380 |
| cacctccacg gacacccgga tcttctgctc tggaggctgc ctggtgttgt gtgcgtctat | 1440 |
| ccgctgcagc atcttcacct gctccgatgc gttccggccc tcaatgtgga tccacttgaa | 1500 |
| ctgggtcaga tcaaccttct caaagtctgt agcagacaca tctggcaggc tccttatctc | 1560 |
| cgagtcctcc ttagggtact tgtccaccag gctgatgacg tccagcacca ctagccccac | 1620 |
| gcacaggatc tgcttctctt ccatgaggct actcccagag cttcctgccc gcccggctga | 1680 |
| cggggttcct cccggcctct gcctcttatc caggaggatg gtgtccccgc tcccagctgc | 1740 |
| cctggctcct cctccgcgtg ggagctcctc ctccagggag ccacctgcag cggccagggg | 1800 |
| tgcagggaac gaaaggagca gggcccttcc tcgcgacacc cgaagacccg agcgggtcta | 1860 |
| ggaaagccaa cccagaggtc ttggtccccg gtcttcccgt agcaggttgc ctgggcctgc | 1920 |
| agatggcaac gcctcccact tctcagcctt agtttcctcg cttgtcagat ggactcacag | 1980 |
| ctgatgcaaa cctttttaaa gcgcggctaa gcgatctcga gaatgcaaag agaaaatgcg | 2040 |
| ctacttgccc cgcactctcc tgcacctgcg tctccgactc ccgacccggg acacgcgagg | 2100 |
| tacagctggg cctcgcatct gcagccctgc ctgaagcccg cggt | 2144 |
| <210> 25 | |
| <211> 2397 | |
| <212> DNA | |
| <213> Homo sapiens | |
| <400> 25 | |
| aggcagggct gcagatgcga ggcccagctg tacctcgcgt gtcccgggtc gggagtcgga | 60 |
| gacgcaggtg caggagagtg cggggcaagt agcgcatttt ctctttgcat tctcgagatc | 120 |
| gcttagccgc gctttaaaaa ggtttgcatc agctgtgagt ccatctgaca agcgaggaaa | 180 |
| ctaaggctga gaagtgggag gcgttgccat ctgcaggccc aggcaacctg ctacgggaag | 240 |
| accggggacc aagacctctg ggttggcttt cctagacccg ctcgggtctt cgggtgtcgc | 300 |
| gaggaagggc cctgctcctt tcgttccctg cacccctggc cgctgcaggt ggctccctgg | 360 |
| aggaggagct cccacgcgga ggaggagcca gggcagctgg gagcggggac accatcctcc | 420 |
| tggataagag gcagaggccg ggaggaaccc cgtcagccgg gcgggcagga agctctggga | 480 |
| gtagcctcat ggaagagaag cagatcctgt gcgtggggct agtggtgctg gacgtcatca | 540 |
| gcctggtgga caagtaccct aaggaggact cggagataag gtgtttgtcc cagagatggc | 600 |
| agcgcggagg caacgcgtcc aactcctgca ccgttctctc cctgctcgga gccccctgtg | 660 |
| ccttcatggg ctcaatggct cctggccatg ttgctgactt cctggtggcc gacttcaggc | 720 |
| ggcggggcgt ggacgtgtct caggtggcct ggcagagcaa gggggacacc cccagctcct | 780 |
| gctgcatcat caacaactcc aatggcaacc gtaccattgt gctccatgac acgagcctgc | 840 |
| cagatgtgtc tgctacagac tttgagaagg ttgatctgac ccagttcaag tggatccaca | 900 |
| ttgagggccg gaacgcatcg gagcaggtga agatgctgca gcggatagac gcacacaaca | 960 |
| ccaggcagcc tccagagcag aagatccggg tgtccgtgga ggtggagaag ccacgagagg | 1020 |
| agctcttcca gctgtttggc tacggagacg tggtgtttgt cagcaaagat gtggccaagc | 1080 |
| acttggggtt ccagtcagca gaggaagcct tgaggggctt gtatggtcgt gtgaggaaag | 1140 |
| gggctgtgct tgtctgtgcc tgggctgagg agggcgccga cgccctgggc cctgatggca | 1200 |
| aattgctcca ctcggatgct ttcccgccac cccgcgtggt ggatacactg ggagctggag | 1260 |
| acaccttcaa tgcctccgtc atcttcagcc tctcccaggg gaggagcgtg caggaagcac | 1320 |
| tgagattcgg gtgccaggtg gccggcaaga agtgtggcct gcagggcttt gatggcatcg | 1380 |
| tgtgagagca ggtgccggct cctcacacac catggagact accattgcgg ctgcatcgcc | 1440 |
| ttctcccctc catccagcct ggcgtccagg ttgccctgtt caggggacag atgcaagctg | 1500 |
| tggggaggac tctgcctgtg tcctgtgttc cccacaggga gaggctctgg ggggatggct | 1560 |
| gggggatgca gagcctcaga gcaaataaat cttcctcaga gccagcttct cctctcaatg | 1620 |
| tctgaactgc tctggctggg cattcctgag gctctgactc ttcgatcctc cctctttgtg | 1680 |
| tccattcccc aaattaacct ctccgcccag gcccagagga ggggctgcct gggctagagc | 1740 |
| agcgagaagt gccctgggct tgccaccagc tctgccctgg ctggggagga cactcggtgc | 1800 |
| cccacaccca gtgaacctgc caaagaaacc gtgagagctc ttcggggccc tgcgttgtgc | 1860 |
| agactctatt cccacagctc agaagctggg agtccacacc gctgagctga actgacaggc | 1920 |
| cagtgggggg caggggtgcg cctcctctgc cctgcccacc agcctgtgat ttgatggggt | 1980 |
| cttcattgtc cagaaatacc tcctcccgct gactgcccca gagcctgaaa gtctcaccct | 2040 |
| tggagcccac cttggaatta agggcgtgcc tcagccacaa atgtgaccca ggatacagag | 2100 |
| tgttgctgtc ctcagggagg tccgatctgg aacacatatt ggaattgggg ccaactccaa | 2160 |
| tatagggtgg gtaaggcctt ataatgtaaa gagcatataa tgtaaagggc tttagagtga | 2220 |
| gacagacctg gattaaaatc tgccatttaa ttagctgcat atcaccttag ggtacagcac | 2280 |
| ttaacgcaat ctgcctcaat ttcttcatct gtcaaatgga accaattctg cttggctaca | 2340 |
| gaattattgt gaggataaaa tcatatataa aatgcccagc atgatgcctg atgtgta | 2397 |
| <210> 26 | |
| <211> 2397 | |
| <212> DNA | |
| <213> Homo sapiens | |
| <400> 26 | |
| tacacatcag gcatcatgct gggcatttta tatatgattt tatcctcaca ataattctgt | 60 |
| agccaagcag aattggttcc atttgacaga tgaagaaatt gaggcagatt gcgttaagtg | 120 |
| ctgtacccta aggtgatatg cagctaatta aatggcagat tttaatccag gtctgtctca | 180 |
| ctctaaagcc ctttacatta tatgctcttt acattataag gccttaccca ccctatattg | 240 |
| gagttggccc caattccaat atgtgttcca gatcggacct ccctgaggac agcaacactc | 300 |
| tgtatcctgg gtcacatttg tggctgaggc acgcccttaa ttccaaggtg ggctccaagg | 360 |
| gtgagacttt caggctctgg ggcagtcagc gggaggaggt atttctggac aatgaagacc | 420 |
| ccatcaaatc acaggctggt gggcagggca gaggaggcgc acccctgccc cccactggcc | 480 |
| tgtcagttca gctcagcggt gtggactccc agcttctgag ctgtgggaat agagtctgca | 540 |
| caacgcaggg ccccgaagag ctctcacggt ttctttggca ggttcactgg gtgtggggca | 600 |
| ccgagtgtcc tccccagcca gggcagagct ggtggcaagc ccagggcact tctcgctgct | 660 |
| ctagcccagg cagcccctcc tctgggcctg ggcggagagg ttaatttggg gaatggacac | 720 |
| aaagagggag gatcgaagag tcagagcctc aggaatgccc agccagagca gttcagacat | 780 |
| tgagaggaga agctggctct gaggaagatt tatttgctct gaggctctgc atcccccagc | 840 |
| catcccccca gagcctctcc ctgtggggaa cacaggacac aggcagagtc ctccccacag | 900 |
| cttgcatctg tcccctgaac agggcaacct ggacgccagg ctggatggag gggagaaggc | 960 |
| gatgcagccg caatggtagt ctccatggtg tgtgaggagc cggcacctgc tctcacacga | 1020 |
| tgccatcaaa gccctgcagg ccacacttct tgccggccac ctggcacccg aatctcagtg | 1080 |
| cttcctgcac gctcctcccc tgggagaggc tgaagatgac ggaggcattg aaggtgtctc | 1140 |
| cagctcccag tgtatccacc acgcggggtg gcgggaaagc atccgagtgg agcaatttgc | 1200 |
| catcagggcc cagggcgtcg gcgccctcct cagcccaggc acagacaagc acagcccctt | 1260 |
| tcctcacacg accatacaag cccctcaagg cttcctctgc tgactggaac cccaagtgct | 1320 |
| tggccacatc tttgctgaca aacaccacgt ctccgtagcc aaacagctgg aagagctcct | 1380 |
| ctcgtggctt ctccacctcc acggacaccc ggatcttctg ctctggaggc tgcctggtgt | 1440 |
| tgtgtgcgtc tatccgctgc agcatcttca cctgctccga tgcgttccgg ccctcaatgt | 1500 |
| ggatccactt gaactgggtc agatcaacct tctcaaagtc tgtagcagac acatctggca | 1560 |
| ggctcgtgtc atggagcaca atggtacggt tgccattgga gttgttgatg atgcagcagg | 1620 |
| agctgggggt gtcccccttg ctctgccagg ccacctgaga cacgtccacg ccccgccgcc | 1680 |
| tgaagtcggc caccaggaag tcagcaacat ggccaggagc cattgagccc atgaaggcac | 1740 |
| agggggctcc gagcagggag agaacggtgc aggagttgga cgcgttgcct ccgcgctgcc | 1800 |
| atctctggga caaacacctt atctccgagt cctccttagg gtacttgtcc accaggctga | 1860 |
| tgacgtccag caccactagc cccacgcaca ggatctgctt ctcttccatg aggctactcc | 1920 |
| cagagcttcc tgcccgcccg gctgacgggg ttcctcccgg cctctgcctc ttatccagga | 1980 |
| ggatggtgtc cccgctccca gctgccctgg ctcctcctcc gcgtgggagc tcctcctcca | 2040 |
| gggagccacc tgcagcggcc aggggtgcag ggaacgaaag gagcagggcc cttcctcgcg | 2100 |
| acacccgaag acccgagcgg gtctaggaaa gccaacccag aggtcttggt ccccggtctt | 2160 |
| cccgtagcag gttgcctggg cctgcagatg gcaacgcctc ccacttctca gccttagttt | 2220 |
| cctcgcttgt cagatggact cacagctgat gcaaaccttt ttaaagcgcg gctaagcgat | 2280 |
| ctcgagaatg caaagagaaa atgcgctact tgccccgcac tctcctgcac ctgcgtctcc | 2340 |
| gactcccgac ccgggacacg cgaggtacag ctgggcctcg catctgcagc cctgcct | 2397 |
| <210> 27 | |
| <211> 2397 | |
| <212> DNA | |
| <213> Homo sapiens | |
| <400> 27 | |
| aggcagggct gcagatgcga ggcccagctg tacctcgcgt gtcccgggtc gggagtcgga | 60 |
| gacgcaggtg caggagagtg cggggcaagt agcgcatttt ctctttgcat tctcgagatc | 120 |
| gcttagccgc gctttaaaaa ggtttgcatc agctgtgagt ccatctgaca agcgaggaaa | 180 |
| ctaaggctga gaagtgggag gcgttgccat ctgcaggccc aggcaacctg ctacgggaag | 240 |
| accggggacc aagacctctg ggttggcttt cctagacccg ctcgggtctt cgggtgtcgc | 300 |
| gaggaagggc cctgctcctt tcgttccctg cacccctggc cgctgcaggt ggctccctgg | 360 |
| aggaggagct cccacgcgga ggaggagcca gggcagctgg gagcggggac accatcctcc | 420 |
| tggataagag gcagaggccg ggaggaaccc cgtcagccgg gCgggcagga agctctggga | 480 |
| gtagcctcat ggaagagaag cagatcctgt gcgtggggct agtggtgctg gacgtcatca | 540 |
| gcctggtgga caagtaccct aaggaggact cggagataag gtgtttgtcc cagagatggc | 600 |
| agcgcggagg caacgcgtcc aactcctgca ccgttctctc cctgctcgga gccccctgtg | 660 |
| ccttcatggg ctcaatggct cctggccatg ttgctgattt tgtcctggat gacctccgcc | 720 |
| gctattctgt ggacctacgc tacacagtct ttcagaccac aggctccgtc cccatcgcca | 780 |
| cggtcatcat caacgaggcc agtggtagcc gcaccatcct atactatgac aggagcctgc | 840 |
| cagatgtgtc tgctacagac tttgagaagg ttgatctgac ccagttcaag tggatccaca | 900 |
| ttgagggccg gaacgcatcg gagcaggtga agatgctgca gcggatagac gcacacaaca | 960 |
| ccaggcagcc tccagagcag aagatccggg tgtccgtgga ggtggagaag ccacgagagg | 1020 |
| agctcttcca gctgtttggc tacggagacg tggtgtttgt cagcaaagat gtggccaagc | 1080 |
| acttggggtt ccagtcagca gaggaagcct tgaggggctt gtatggtcgt gtgaggaaag | 1140 |
| gggctgtgct tgtctgtgcc tgggctgagg agggcgccga cgccctgggc cctgatggca | 1200 |
| aattgctcca ctcggatgct ttcccgccac cccgcgtggt ggatacactg ggagctggag | 1260 |
| acaccttcaa tgcctccgtc atcttcagcc tctcccaggg gaggagcgtg caggaagcac | 1320 |
| tgagattcgg gtgccaggtg gccggcaaga agtgtggcct gcagggcttt gatggcatcg | 1380 |
| tgtgagagca ggtgccggct cctcacacac catggagact accattgcgg ctgcatcgcc | 1440 |
| ttctcccctc catccagcct ggcgtccagg ttgccctgtt caggggacag atgcaagctg | 1500 |
| tggggaggac tctgcctgtg tcctgtgttc cccacaggga gaggctctgg ggggatggct | 1560 |
| gggggatgca gagcctcaga gcaaataaat cttcctcaga gccagcttct cctctcaatg | 1620 |
| tctgaactgc tctggctggg cattcctgag gctctgactc ttcgatcctc cctctttgtg | 1680 |
| tccattcccc aaattaacct ctccgcccag gcccagagga ggggctgcct gggctagagc | 1740 |
| agcgagaagt gccctgggct tgccaccagc tctgccctgg ctggggagga cactcggtgc | 1800 |
| cccacaccca gtgaacctgc caaagaaacc gtgagagctc ttcggggccc tgcgttgtgc | 1860 |
| agactctatt cccacagctc agaagctggg agtccacacc gctgagctga actgacaggc | 1920 |
| cagtgggggg caggggtgcg cctcctctgc cctgcccacc agcctgtgat ttgatggggt | 1980 |
| cttcattgtc cagaaatacc tcctcccgct gactgcccca gagcctgaaa gtctcaccct | 2040 |
| tggagcccac cttggaatta agggcgtgcc tcagccacaa atgtgaccca ggatacagag | 2100 |
| tgttgctgtc ctcagggagg tccgatctgg aacacatatt ggaattgggg ccaactccaa | 2160 |
| tatagggtgg gtaaggcctt ataatgtaaa gagcatataa tgtaaagggc tttagagtga | 2220 |
| gacagacctg gattaaaatc tgccatttaa ttagctgcat atcaccttag ggtacagcac | 2280 |
| ttaacgcaat ctgcctcaat ttcttcatct gtcaaatgga accaattctg cttggctaca | 2340 |
| gaattattgt gaggataaaa tcatatataa aatgcccagc atgatgcctg atgtgta | 2397 |
| <210> 28 | |
| <211> 2397 | |
| <212> DNA | |
| <213> Homo sapiens | |
| <400> 28 | |
| tacacatcag gcatcatgct gggcatttta tatatgattt tatcctcaca ataattctgt | 60 |
| agccaagcag aattggttcc atttgacaga tgaagaaatt gaggcagatt gcgttaagtg | 120 |
| ctgtacccta aggtgatatg cagctaatta aatggcagat tttaatccag gtctgtctca | 180 |
| ctctaaagcc ctttacatta tatgctcttt acattataag gccttaccca ccctatattg | 240 |
| gagttggccc caattccaat atgtgttcca gatcggacct ccctgaggac agcaacactc | 300 |
| tgtatcctgg gtcacatttg tggctgaggc acgcccttaa ttccaaggtg ggctccaagg | 360 |
| gtgagacttt caggctctgg ggcagtcagc gggaggaggt atttctggac aatgaagacc | 420 |
| ccatcaaatc acaggctggt gggcagggca gaggaggcgc acccctgccc cccactggcc | 480 |
| tgtcagttca gctcagcggt gtggactccc agcttctgag ctgtgggaat agagtctgca | 540 |
| caacgcaggg ccccgaagag ctctcacggt ttctttggca ggttcactgg gtgtggggca | 600 |
| ccgagtgtcc tccccagcca gggcagagct ggtggcaagc ccagggcact tctcgctgct | 660 |
| ctagcccagg cagcccctcc tctgggcctg ggcggagagg ttaatttggg gaatggacac | 720 |
| aaagagggag gatcgaagag tcagagcctc aggaatgccc agccagagca gttcagacat | 780 |
| tgagaggaga agctggctct gaggaagatt tatttgctct gaggctctgc atcccccagc | 840 |
| catcccccca gagcctctcc ctgtggggaa cacaggacac aggcagagtc ctccccacag | 900 |
| cttgcatctg tcccctgaac agggcaacct ggacgccagg ctggatggag gggagaaggc | 960 |
| gatgcagccg caatggtagt ctccatggtg tgtgaggagc cggcacctgc tctcacacga | 1020 |
| tgccatcaaa gccctgcagg ccacacttct tgccggccac ctggcacccg aatctcagtg | 1080 |
| cttcctgcac gctcctcccc tgggagaggc tgaagatgac ggaggcattg aaggtgtctc | 1140 |
| cagctcccag tgtatccacc acgcggggtg gcgggaaagc atccgagtgg agcaatttgc | 1200 |
| catcagggcc cagggcgtcg gcgccctcct cagcccaggc acagacaagc acagcccctt | 1260 |
| tcctcacacg accatacaag cccctcaagg cttcctctgc tgactggaac cccaagtgct | 1320 |
| tggccacatc tttgctgaca aacaccacgt ctccgtagcc aaacagctgg aagagctcct | 1380 |
| ctcgtggctt ctccacctcc acggacaccc ggatcttctg ctctggaggc tgcctggtgt | 1440 |
| tgtgtgcgtc tatccgctgc agcatcttca cctgctccga tgcgttccgg ccctcaatgt | 1500 |
| ggatccactt gaactgggtc agatcaacct tctcaaagtc tgtagcagac acatctggca | 1560 |
| ggctcctgtc atagtatagg atggtgcggc taccactggc ctcgttgatg atgaccgtgg | 1620 |
| cgatggggac ggagcctgtg gtctgaaaga ctgtgtagcg taggtccaca gaatagcggc | 1680 |
| ggaggtcatc caggacaaaa tcagcaacat ggccaggagc cattgagccc atgaaggcac | 1740 |
| agggggctcc gagcagggag agaacggtgc aggagttgga cgcgttgcct ccgcgctgcc | 1800 |
| atctctggga caaacacctt atctccgagt cctccttagg gtacttgtcc accaggctga | 1860 |
| tgacgtccag caccactagc cccacgcaca ggatctgctt ctcttccatg aggctactcc | 1920 |
| cagagcttcc tgcccgcccg gctgacgggg ttcctcccgg cctctgcctc ttatccagga | 1980 |
| ggatggtgtc cccgctccca gctgccctgg ctcctcctcc gcgtgggagc tcctcctcca | 2040 |
| gggagccacc tgcagcggcc aggggtgcag ggaacgaaag gagcagggcc cttcctcgcg | 2100 |
| acacccgaag acccgagcgg gtctaggaaa gccaacccag aggtcttggt ccccggtctt | 2160 |
| cccgtagcag gttgcctggg cctgcagatg gcaacgcctc ccacttctca gccttagttt | 2220 |
| cctcgcttgt cagatggact cacagctgat gcaaaccttt ttaaagcgcg gctaagcgat | 2280 |
| ctcgagaatg caaagagaaa atgcgctact tgccccgcac tctcctgcac ctgcgtctcc | 2340 |
| gactcccgac ccgggacacg cgaggtacag ctgggcctcg catctgcagc cctgcct | 2397 |
| <210> 29 | |
| <211> 1590 | |
| <212> DNA | |
| <213> Mus musculus | |
| <400> 29 | |
| gagggagaga acgcttgctt ctgtgctccg cctgcgaagg cgaagtttct gttgccagac | 60 |
| tgtgctagtc cgggtggtcc agggtctgca gcaggcgcag agggatcgga aaggcgatgc | 120 |
| attactagtg cgctttcgct ttgacagctg aggcggaaaa gtgagagggc ctgccattgg | 180 |
| ccgggctagg taacccaccc ttgcaaagca gaaagctccc tgcgggagga gttctgcacg | 240 |
| cagaggagga gccaaggtag ccagtgagaa gttgggacac ggtcctccag tagataagag | 300 |
| gcagagccca gcaggaaccc cctctgcttg cgggtaggaa gcttggggag cagcctcatg | 360 |
| gaagagaagc agatcctgtg cgtggggctg gtggtgctgg acatcatcaa tgtggtggac | 420 |
| aaatacccag aggaagacac ggatcgcagg tgcctgtccc agagatggca gcgtggaggc | 480 |
| aacgcatcca actcctgcac tgtcctttcc ttgcttggag cccgctgtgc cttcatgggc | 540 |
| tctttggccc ctggccacgt tgccgatttt gtcctggatg acctccgcca acattctgtg | 600 |
| gacttacgat atgtggtcct tcagaccgag ggctccatcc ccacttctac agtcatcatc | 660 |
| aacgaggcca gcggcagccg caccattctg cacgcctaca gcttcctggt ggctgacttc | 720 |
| aggcagaggg gcgtggatgt gtctcaagtg acttggcaga gccagggaga taccccttgc | 780 |
| tcttgctgca tcgtcaacaa ctccaatggc tcccgtacca ttatactcta cgacacgaac | 840 |
| ctgccagatg tgtctgctaa ggactttgag aaggtcgatc tgacccggtt caagtggatc | 900 |
| cacattgagg gccggaatgc atcggaacag gtgaagatgc tgcagcggat agaggagcac | 960 |
| aatgccaagc agcctctgcc acagaaggtc cgggtgtcgg tggagataga gaagccccgt | 1020 |
| gaggagctct tccagttgtt tagctatggt gaggtggtgt ttgtcagcaa agatgtggcc | 1080 |
| aagcacctgg ggttccagtc agcagtggag gccctgaggg gcttgtacag tcgagtgaag | 1140 |
| aaaggggcta cgcttgtctg tgcctgggct gaggagggtg ccgatgccct gggccccgat | 1200 |
| ggtcagctgc tccactcaga tgccttccca ccgccccgag tagtagacac tcttggggct | 1260 |
| ggagacacct tcaatgcctc tgtcatcttc agcctctcga agggaaacag catgcaagag | 1320 |
| gccctgagat tcgggtgcca ggtggctggc aagaagtgtg gcttgcaggg gtttgatggc | 1380 |
| attgtgtgag aggcaagcgg caccagctcg atacctcaga ggctggcacc atgcctgcca | 1440 |
| ctgccttctc tacttcctcc agcttagcat ccagctgcca ttccccggca ggtgtgggat | 1500 |
| gtgggacagc ctctgtctgt gtctgcgtct ctgtatacct atctcctctc tgcagatacc | 1560 |
| tggagcaaat aaatcttccc ctgagccagc | 1590 |
| <210> 30 | |
| <211> 1590 | |
| <212> DNA | |
| <213> Mus musculus | |
| <400> 30 | |
| gctggctcag gggaagattt atttgctcca ggtatctgca gagaggagat aggtatacag | 60 |
| agacgcagac acagacagag gctgtcccac atcccacacc tgccggggaa tggcagctgg | 120 |
| atgctaagct ggaggaagta gagaaggcag tggcaggcat ggtgccagcc tctgaggtat | 180 |
| cgagctggtg ccgcttgcct ctcacacaat gccatcaaac ccctgcaagc cacacttctt | 240 |
| gccagccacc tggcacccga atctcagggc ctcttgcatg ctgtttccct tcgagaggct | 300 |
| gaagatgaca gaggcattga aggtgtctcc agccccaaga gtgtctacta ctcggggcgg | 360 |
| tgggaaggca tctgagtgga gcagctgacc atcggggccc agggcatcgg caccctcctc | 420 |
| agcccaggca cagacaagcg tagccccttt cttcactcga ctgtacaagc ccctcagggc | 480 |
| ctccactgct gactggaacc ccaggtgctt ggccacatct ttgctgacaa acaccacctc | 540 |
| accatagcta aacaactgga agagctcctc acggggcttc tctatctcca ccgacacccg | 600 |
| gaccttctgt ggcagaggct gcttggcatt gtgctcctct atccgctgca gcatcttcac | 660 |
| ctgttccgat gcattccggc cctcaatgtg gatccacttg aaccgggtca gatcgacctt | 720 |
| ctcaaagtcc ttagcagaca catctggcag gttcgtgtcg tagagtataa tggtacggga | 780 |
| gccattggag ttgttgacga tgcagcaaga gcaaggggta tctccctggc tctgccaagt | 840 |
| cacttgagac acatccacgc ccctctgcct gaagtcagcc accaggaagc tgtaggcgtg | 900 |
| cagaatggtg cggctgccgc tggcctcgtt gatgatgact gtagaagtgg ggatggagcc | 960 |
| ctcggtctga aggaccacat atcgtaagtc cacagaatgt tggcggaggt catccaggac | 1020 |
| aaaatcggca acgtggccag gggccaaaga gcccatgaag gcacagcggg ctccaagcaa | 1080 |
| ggaaaggaca gtgcaggagt tggatgcgtt gcctccacgc tgccatctct gggacaggca | 1140 |
| cctgcgatcc gtgtcttcct ctgggtattt gtccaccaca ttgatgatgt ccagcaccac | 1200 |
| cagccccacg cacaggatct gcttctcttc catgaggctg ctccccaagc ttcctacccg | 1260 |
| caagcagagg gggttcctgc tgggctctgc ctcttatcta ctggaggacc gtgtcccaac | 1320 |
| ttctcactgg ctaccttggc tcctcctctg cgtgcagaac tcctcccgca gggagctttc | 1380 |
| tgctttgcaa gggtgggtta cctagcccgg ccaatggcag gccctctcac ttttccgcct | 1440 |
| cagctgtcaa agcgaaagcg cactagtaat gcatcgcctt tccgatccct ctgcgcctgc | 1500 |
| tgcagaccct ggaccacccg gactagcaca gtctggcaac agaaacttcg ccttcgcagg | 1560 |
| cggagcacag aagcaagcgt tctctccctc | 1590 |
| <210> 31 | |
| <211> 1307 | |
| <212> DNA | |
| <213> Rattus norvegicus | |
| <400> 31 | |
| gtgagagggt ctgccattgg ccggactagg taaccaaacc ctcgcaacag cagaaagcac | 60 |
| cctgcgggag gagctccgca ggcagaggag gagccagggt agcccctgag aagttgggac | 120 |
| acggtcctgc ggtagataag agacagagtc tagcaggaat cccctccgct tgcgggtagg | 180 |
| aagcttgggg agcagcctca tggaagagaa gcagatcctg tgcgtggggc tggtggtgct | 240 |
| ggacatcatc aatgtggtgg acaaataccc agaggaagac acggatcgca ggtgcctatc | 300 |
| ccagagatgg cagcgtggag gcaacgcgtc caactcctgc actgtgcttt ccttgctcgg | 360 |
| agcccgctgt gccttcatgg gctcgctggc ccatggccat gttgccgact tcctggtggc | 420 |
| cgacttcagg cggaggggtg tggatgtgtc tcaagtggcc tggcagagcc agggagatac | 480 |
| cccttgctcc tgctgcatcg tcaacaactc caatggctcc cgtaccatta ttctctacga | 540 |
| cacgaacctg ccagatgtgt ctgctaagga ctttgagaag gtcgatctga cccggttcaa | 600 |
| gtggatccac attgagggcc ggaatgcatc ggaacaggta aagatgctac agcggataga | 660 |
| acagtacaat gccacgcagc ctctgcagca gaaggtccgg gtgtccgtgg agatagagaa | 720 |
| gccccgagag gaactcttcc agctgttcgg ctatggagag gtggtgtttg tcagcaaaga | 780 |
| tgtggccaag cacctggggt tccggtcagc aggggaggcc ctgaagggct tgtacagtcg | 840 |
| tgtgaagaaa ggggctacgc tcatctgtgc ctgggctgag gagggagccg atgccctggg | 900 |
| ccccgacggc cagctgctcc actcagatgc cttcccacca ccccgagtag tagacactct | 960 |
| cggggctgga gacaccttca atgcctctgt catcttcagc ctctccaagg gaaacagcat | 1020 |
| gcaggaggcc ctgagattcg ggtgccaggt ggctggcaag aagtgtggct tgcaggggtt | 1080 |
| tgatggcatt gtgtgagaga tgagcggtgg gaggtagcag ctcgacacct cagaggctgg | 1140 |
| caccactgcc tgccattgcc ttcttcattt catccagcct ggcgtctggc tgcccagttc | 1200 |
| cctgggccag tgtaggctgt ggaacgggtc tttctgtctc ttctctgcag acacctggag | 1260 |
| caaataaatc ttcccctgag ccaaaaaaaa aaaaaaaaaa aaaaaaa | 1307 |
| <210> 32 | |
| <211> 1307 | |
| <212> DNA | |
| <213> Rattus norvegicus | |
| <400> 32 | |
| tttttttttt tttttttttt tttttggctc aggggaagat ttatttgctc caggtgtctg | 60 |
| cagagaagag acagaaagac ccgttccaca gcctacactg gcccagggaa ctgggcagcc | 120 |
| agacgccagg ctggatgaaa tgaagaaggc aatggcaggc agtggtgcca gcctctgagg | 180 |
| tgtcgagctg ctacctccca ccgctcatct ctcacacaat gccatcaaac ccctgcaagc | 240 |
| cacacttctt gccagccacc tggcacccga atctcagggc ctcctgcatg ctgtttccct | 300 |
| tggagaggct gaagatgaca gaggcattga aggtgtctcc agccccgaga gtgtctacta | 360 |
| ctcggggtgg tgggaaggca tctgagtgga gcagctggcc gtcggggccc agggcatcgg | 420 |
| ctccctcctc agcccaggca cagatgagcg tagccccttt cttcacacga ctgtacaagc | 480 |
| ccttcagggc ctcccctgct gaccggaacc ccaggtgctt ggccacatct ttgctgacaa | 540 |
| acaccacctc tccatagccg aacagctgga agagttcctc tcggggcttc tctatctcca | 600 |
| cggacacccg gaccttctgc tgcagaggct gcgtggcatt gtactgttct atccgctgta | 660 |
| gcatctttac ctgttccgat gcattccggc cctcaatgtg gatccacttg aaccgggtca | 720 |
| gatcgacctt ctcaaagtcc ttagcagaca catctggcag gttcgtgtcg tagagaataa | 780 |
| tggtacggga gccattggag ttgttgacga tgcagcagga gcaaggggta tctccctggc | 840 |
| tctgccaggc cacttgagac acatccacac ccctccgcct gaagtcggcc accaggaagt | 900 |
| cggcaacatg gccatgggcc agcgagccca tgaaggcaca gcgggctccg agcaaggaaa | 960 |
| gcacagtgca ggagttggac gcgttgcctc cacgctgcca tctctgggat aggcacctgc | 1020 |
| gatccgtgtc ttcctctggg tatttgtcca ccacattgat gatgtccagc accaccagcc | 1080 |
| ccacgcacag gatctgcttc tcttccatga ggctgctccc caagcttcct acccgcaagc | 1140 |
| ggaggggatt cctgctagac tctgtctctt atctaccgca ggaccgtgtc ccaacttctc | 1200 |
| aggggctacc ctggctcctc ctctgcctgc ggagctcctc ccgcagggtg ctttctgctg | 1260 |
| ttgcgagggt ttggttacct agtccggcca atggcagacc ctctcac | 1307 |
| <210> 33 | |
| <211> 2461 | |
| <212> DNA | |
| <213> Oryctolagus cuniculus | |
| <400> 33 | |
| cgagcccggg ggacgagcta ggaagctgag gtccgggagt gggaggtgtt gccacctgcg | 60 |
| aggccaggtc ggccgcttcg gggagacctc gggatcggcc ctcttgggcc ggcctgggtc | 120 |
| cttgggctgc ggcggccggg gccctgctcc gttccctgca ccctccggcg ccgccgtgga | 180 |
| ctcccggggg aggagctgtg cacgcggagg aggagccggg gcagcccctg ggagcgggac | 240 |
| cggccctgcg ggataagagg cagggcccgg gaaggcactc cgacagcctg gcgggcccaa | 300 |
| agctcgggcg cagcctcatg gaggagaagc agatcctgtg cgtggggctg gtggtgctgg | 360 |
| acgtcatcaa tgtagtggac aagtacccgg aggaggacac ggacagcagg tgcttgtccc | 420 |
| agagatggca gcgtggaggc aatgcgtcca actcctgcac tgtgctgtcc ctgctcggag | 480 |
| ccccctgtgc cttcatgggc tcgctggctg ctgaccacgt tgccgactgc gctgtgctcc | 540 |
| cctcaacctt cgtcgaactg cgccccctgg ctcgcttgcc ctggcagctt tgtcctggag | 600 |
| gacctgcgcc gctattctgt ggacctacgc tacacagtct ttcagaccca gggctctgtc | 660 |
| cccacctcca cagtcatcat cagcgaggcc actgggagcc gcaccatcct ccacgcctac | 720 |
| agcttcctgg tggccgactt caggcggcgg ggcgtggacg tgtctcaggt ggcctggcag | 780 |
| gacaggggag agaccccctg ctcctgctgc atcgtcaaca gcaccaatgg ttcccgtacc | 840 |
| attgtgctct acgacacgaa cctgccagat gtgtctgcta aggactttga gaaggttgat | 900 |
| ctgaaccggt tcaagtggat ccacattgag ggacggaacg catcggagca ggtgaagatg | 960 |
| ctgcagagga tagaacagca caacgccagg cagcctgcag agcagaggat ccgggtgtcc | 1020 |
| gtggagatag agaagccccg ggaggagctg ttccagctgt ttggctatgg agaggtggtg | 1080 |
| tttgtcagca aagacgtggc caggcacctg ggcttcggct ccgcggagga agccctcagg | 1140 |
| ggcttgtact cgcgtgtgcg gaaaggggcc acgctggtct gcgcctgggc cgagcagggc | 1200 |
| gccgacgcgc tgggccccga cggccagctg ctgcactccg acgccgtgtc gcccccacga | 1260 |
| gtggtggata ctctgggggc cggagacacc ttcaacgcct ccgtcatctt cagcctgtcc | 1320 |
| caggggaaga gcatgctgga ggcactgagg tttggctgca aggtggccgg caagaagtgt | 1380 |
| ggtgtgcatg gcttcgatgg catcgtgtga gaggccccag gcctggcatc gcccgtgtgt | 1440 |
| ccagcctggc gtcccagctg ccctgctcct tgctggccgt ggggaggggt ctgtgtgtgc | 1500 |
| cctgtgtcgc ctcccacccc tctccttgca gagccacaga gcaaataaac ctcctctgag | 1560 |
| ccggcgtccc ctctatctgc ttcctggtgg ctggggactc ccacggcttc caaccacggt | 1620 |
| cctccctcct cccctccatt cctcaacttg accttcacac ccagaccgct acaaggaggc | 1680 |
| gctgcccagg ccagggcagc aggaagtgcc ccagccttgc cacccgccct gtcctcgggg | 1740 |
| tgcagaaggc tcagccgtcc ctgcactggg cagaggcctt gagccatcac cccccccaac | 1800 |
| cccgccccga ccccctgcag gcaaggacgc ttcactcgta ccctgcagca agcctggaga | 1860 |
| aaatcgcccc tgggccccaa gcggctgagc ccctggactg gccagtgctt tggcagcctc | 1920 |
| tctgtggtca ggtggggcct tcaccgccca agcctgcctc cttgaggggc tgcctggagc | 1980 |
| ctgcaaggtc caccctcggc acctgcctta cggttaaggc agctgcgacc cagggtccag | 2040 |
| ggtcctccct ctggcagatc gggtgtggag ggcctgtggg aactggggac tgccacgctt | 2100 |
| tgcctggggt ttgagtgtcc cagggttcct gcgttggagt tcagtcccct ttgtgaggtg | 2160 |
| cgatgagggt gggaactgtg gggtgtagag gcagggcctg tgcgggtgtc tagacttaca | 2220 |
| caaggtcgtt agggttgagc tctgggattg aatcctggtg gttctgtatg aaggggacca | 2280 |
| cagcgcctgt gcgcgtgcac acgctcacac acacacacac gcacgcacac acagagcatc | 2340 |
| tcgccatgcg gtgccctgtg ccccttggga ctctcagcag gaaggccata tcaccagatg | 2400 |
| tggccccacc gcctgggacc agaactgcaa gccaaaataa acctcttttc tttataagtt | 2460 |
| a | 2461 |
| <210> 34 | |
| <211> 2461 | |
| <212> DNA | |
| <213> Oryctolagus cuniculus | |
| <400> 34 | |
| taacttataa agaaaagagg tttattttgg cttgcagttc tggtcccagg cggtggggcc | 60 |
| acatctggtg atatggcctt cctgctgaga gtcccaaggg gcacagggca ccgcatggcg | 120 |
| agatgctctg tgtgtgcgtg cgtgtgtgtg tgtgtgagcg tgtgcacgcg cacaggcgct | 180 |
| gtggtcccct tcatacagaa ccaccaggat tcaatcccag agctcaaccc taacgacctt | 240 |
| gtgtaagtct agacacccgc acaggccctg cctctacacc ccacagttcc caccctcatc | 300 |
| gcacctcaca aaggggactg aactccaacg caggaaccct gggacactca aaccccaggc | 360 |
| aaagcgtggc agtccccagt tcccacaggc cctccacacc cgatctgcca gagggaggac | 420 |
| cctggaccct gggtcgcagc tgccttaacc gtaaggcagg tgccgagggt ggaccttgca | 480 |
| ggctccaggc agcccctcaa ggaggcaggc ttgggcggtg aaggccccac ctgaccacag | 540 |
| agaggctgcc aaagcactgg ccagtccagg ggctcagccg cttggggccc aggggcgatt | 600 |
| ttctccaggc ttgctgcagg gtacgagtga agcgtccttg cctgcagggg gtcggggcgg | 660 |
| ggttgggggg ggtgatggct caaggcctct gcccagtgca gggacggctg agccttctgc | 720 |
| accccgagga cagggcgggt ggcaaggctg gggcacttcc tgctgccctg gcctgggcag | 780 |
| cgcctccttg tagcggtctg ggtgtgaagg tcaagttgag gaatggaggg gaggagggag | 840 |
| gaccgtggtt ggaagccgtg ggagtcccca gccaccagga agcagataga ggggacgccg | 900 |
| gctcagagga ggtttatttg ctctgtggct ctgcaaggag aggggtggga ggcgacacag | 960 |
| ggcacacaca gacccctccc cacggccagc aaggagcagg gcagctggga cgccaggctg | 1020 |
| gacacacggg cgatgccagg cctggggcct ctcacacgat gccatcgaag ccatgcacac | 1080 |
| cacacttctt gccggccacc ttgcagccaa acctcagtgc ctccagcatg ctcttcccct | 1140 |
| gggacaggct gaagatgacg gaggcgttga aggtgtctcc ggcccccaga gtatccacca | 1200 |
| ctcgtggggg cgacacggcg tcggagtgca gcagctggcc gtcggggccc agcgcgtcgg | 1260 |
| cgccctgctc ggcccaggcg cagaccagcg tggccccttt ccgcacacgc gagtacaagc | 1320 |
| ccctgagggc ttcctccgcg gagccgaagc ccaggtgcct ggccacgtct ttgctgacaa | 1380 |
| acaccacctc tccatagcca aacagctgga acagctcctc ccggggcttc tctatctcca | 1440 |
| cggacacccg gatcctctgc tctgcaggct gcctggcgtt gtgctgttct atcctctgca | 1500 |
| gcatcttcac ctgctccgat gcgttccgtc cctcaatgtg gatccacttg aaccggttca | 1560 |
| gatcaacctt ctcaaagtcc ttagcagaca catctggcag gttcgtgtcg tagagcacaa | 1620 |
| tggtacggga accattggtg ctgttgacga tgcagcagga gcagggggtc tctcccctgt | 1680 |
| cctgccaggc cacctgagac acgtccacgc cccgccgcct gaagtcggcc accaggaagc | 1740 |
| tgtaggcgtg gaggatggtg cggctcccag tggcctcgct gatgatgact gtggaggtgg | 1800 |
| ggacagagcc ctgggtctga aagactgtgt agcgtaggtc cacagaatag cggcgcaggt | 1860 |
| cctccaggac aaagctgcca gggcaagcga gccagggggc gcagttcgac gaaggttgag | 1920 |
| gggagcacag cgcagtcggc aacgtggtca gcagccagcg agcccatgaa ggcacagggg | 1980 |
| gctccgagca gggacagcac agtgcaggag ttggacgcat tgcctccacg ctgccatctc | 2040 |
| tgggacaagc acctgctgtc cgtgtcctcc tccgggtact tgtccactac attgatgacg | 2100 |
| tccagcacca ccagccccac gcacaggatc tgcttctcct ccatgaggct gcgcccgagc | 2160 |
| tttgggcccg ccaggctgtc ggagtgcctt cccgggccct gcctcttatc ccgcagggcc | 2220 |
| ggtcccgctc ccaggggctg ccccggctcc tcctccgcgt gcacagctcc tcccccggga | 2280 |
| gtccacggcg gcgccggagg gtgcagggaa cggagcaggg ccccggccgc cgcagcccaa | 2340 |
| ggacccaggc cggcccaaga gggccgatcc cgaggtctcc ccgaagcggc cgacctggcc | 2400 |
| tcgcaggtgg caacacctcc cactcccgga cctcagcttc ctagctcgtc ccccgggctc | 2460 |
| g | 2461 |
| <210> 35 | |
| <211> 1773 | |
| <212> DNA | |
| <213> Macaca mulatta | |
| <400> 35 | |
| gggccgggca gccgcgacca cggtcttcag gcagggctgc agatgcaggc ccagctctac | 60 |
| ctcgcgggtc cagggtcggg agtccgagac gcaggtgcag cagagggcgg ggcacgtagc | 120 |
| gcatttccag cgcattttct ctttgcattc tcgagatcgc ttagccgcgc tttagaaagg | 180 |
| tttgcatcag ctccgagtcc atctgacaag cgaggaaact gaggctgaga agtgggaggc | 240 |
| gttgccatct gcaggcccag gcaacctgct acgggaagac cgggggccaa gacctccggg | 300 |
| ttggctttcc caggccagct tgggtcttcg ggtgtcggga gcaaaggccc agctcctttc | 360 |
| gtttcctgca cccctcgccg ctgcaggtgg ctccctggag gaggagctcc cacgcggagg | 420 |
| aggagccagg gcagctggga gcgaggacac catcctcctg gataacaggc agaggccggg | 480 |
| aggaacccgt cagtcgggcg ggcaggaagc tctgggatca gcctcatgga agagaagcag | 540 |
| atcctgtgcg tggggctagt ggtgctggac gtcatcagcc tggtggacaa gtaccctaag | 600 |
| gaggactcag agataaggtg cttgtcccag agatggcaac gcggaggcaa cgcgtccaac | 660 |
| tcctgcaccg ttctctccct gctcggagcc ccctgtgcct tcatgggctc aatggcccct | 720 |
| ggccatgttg ctgattttgt cctggatgac ctccgccgct attctgtgga cctacgctac | 780 |
| acggtctttc agaccacggg ctccgtcccc atcgccacgg tcatcatcaa cgaggccagt | 840 |
| ggtagccgca ccatcctata ctacgacagc ttcctggtgg ccgacttcag gcggcggggt | 900 |
| gtggacgtgt ctcaggtggc ctggcagagc aagggggaca cccccagctc ctgctgcatc | 960 |
| atcaacaact ccaatggcaa ccgtaccatt gtgctccatg acacgagcct gccagatgtg | 1020 |
| tctgctacgg actttgagaa ggttgatctg acccagttca agtggatcca cattgagggc | 1080 |
| cggaacgcat cggagcaggt gaagatgctg cagcggatag acgcgcacaa caccaggcag | 1140 |
| cctccagagc agaagatccg ggtgtccgtg gaggtggaga agccacaaga ggagctcttt | 1200 |
| cagctgtttg gctacggaga cgtggtgttt gtcagcaaag atgtggccaa gcacttgggg | 1260 |
| ttccagtcag caggggaagc cctgaggggc ttgtatggtc gtgtgaggaa aggggctgtg | 1320 |
| cttgtctgtg cctgggctga ggagggcgcc gacgccctgg gccctgatgg caaactgatc | 1380 |
| cactcggatg ctttcccgcc accccgcgtg gtggataccc tgggggctgg agacaccttc | 1440 |
| aatgcctccg tcatcttcag cctctcccag gggaggagcg tgcaggaagc actgagattc | 1500 |
| ggatgccagg tggccggcaa gaagtgtggc cagcagggct ttgatggcat cgtgtcagag | 1560 |
| ccggtgcggt aggaggtgcc ggctccccgc acactatgga ggctgacatt gcggctgcat | 1620 |
| cgccttctcc cctccatcca gcctggcatc caggttgccc tgctcagggg acagatgcag | 1680 |
| gctgtgggga ggactccgcc tgtgtcctgt gttccccaca cgtctctccc tgcagagcct | 1740 |
| cagagcgaat aaatcttcct cagagccagc ttc | 1773 |
| <210> 36 | |
| <211> 1773 | |
| <212> DNA | |
| <213> Macaca mulatta | |
| <400> 36 | |
| gaagctggct ctgaggaaga tttattcgct ctgaggctct gcagggagag acgtgtgggg | 60 |
| aacacaggac acaggcggag tcctccccac agcctgcatc tgtcccctga gcagggcaac | 120 |
| ctggatgcca ggctggatgg aggggagaag gcgatgcagc cgcaatgtca gcctccatag | 180 |
| tgtgcgggga gccggcacct cctaccgcac cggctctgac acgatgccat caaagccctg | 240 |
| ctggccacac ttcttgccgg ccacctggca tccgaatctc agtgcttcct gcacgctcct | 300 |
| cccctgggag aggctgaaga tgacggaggc attgaaggtg tctccagccc ccagggtatc | 360 |
| caccacgcgg ggtggcggga aagcatccga gtggatcagt ttgccatcag ggcccagggc | 420 |
| gtcggcgccc tcctcagccc aggcacagac aagcacagcc cctttcctca cacgaccata | 480 |
| caagcccctc agggcttccc ctgctgactg gaaccccaag tgcttggcca catctttgct | 540 |
| gacaaacacc acgtctccgt agccaaacag ctgaaagagc tcctcttgtg gcttctccac | 600 |
| ctccacggac acccggatct tctgctctgg aggctgcctg gtgttgtgcg cgtctatccg | 660 |
| ctgcagcatc ttcacctgct ccgatgcgtt ccggccctca atgtggatcc acttgaactg | 720 |
| ggtcagatca accttctcaa agtccgtagc agacacatct ggcaggctcg tgtcatggag | 780 |
| cacaatggta cggttgccat tggagttgtt gatgatgcag caggagctgg gggtgtcccc | 840 |
| cttgctctgc caggccacct gagacacgtc cacaccccgc cgcctgaagt cggccaccag | 900 |
| gaagctgtcg tagtatagga tggtgcggct accactggcc tcgttgatga tgaccgtggc | 960 |
| gatggggacg gagcccgtgg tctgaaagac cgtgtagcgt aggtccacag aatagcggcg | 1020 |
| gaggtcatcc aggacaaaat cagcaacatg gccaggggcc attgagccca tgaaggcaca | 1080 |
| gggggctccg agcagggaga gaacggtgca ggagttggac gcgttgcctc cgcgttgcca | 1140 |
| tctctgggac aagcacctta tctctgagtc ctccttaggg tacttgtcca ccaggctgat | 1200 |
| gacgtccagc accactagcc ccacgcacag gatctgcttc tcttccatga ggctgatccc | 1260 |
| agagcttcct gcccgcccga ctgacgggtt cctcccggcc tctgcctgtt atccaggagg | 1320 |
| atggtgtcct cgctcccagc tgccctggct cctcctccgc gtgggagctc ctcctccagg | 1380 |
| gagccacctg cagcggcgag gggtgcagga aacgaaagga gctgggcctt tgctcccgac | 1440 |
| acccgaagac ccaagctggc ctgggaaagc caacccggag gtcttggccc ccggtcttcc | 1500 |
| cgtagcaggt tgcctgggcc tgcagatggc aacgcctccc acttctcagc ctcagtttcc | 1560 |
| tcgcttgtca gatggactcg gagctgatgc aaacctttct aaagcgcggc taagcgatct | 1620 |
| cgagaatgca aagagaaaat gcgctggaaa tgcgctacgt gccccgccct ctgctgcacc | 1680 |
| tgcgtctcgg actcccgacc ctggacccgc gaggtagagc tgggcctgca tctgcagccc | 1740 |
| tgcctgaaga ccgtggtcgc ggctgcccgg ccc | 1773 |

### EQUIVALENTS

[0786] Those skilled in the art will recognize, or be able to ascertain using no more than routine experimentation, many equivalents to the specific embodiments and methods described herein. Such equivalents are intended to be encompassed by the scope of the following claims.

The application's sequence listing, which the Patent Office published only in electronic form, follows.

SEQUENCE LISTING (606 sequences)

SEQ ID NO: 1 - DNA, 2283 bp, Homo sapiens
  source 1..2283: mol_type = genomic DNA
ggggcggggcggggccgccgcgaccgcgggcttcaggcagggctgcagatgcgaggcccagctgtacctcgcgtgtcccgggtcgggagtcggagacgcaggtgcaggagagtgcggggcaagtagcgcattttctctttgcattctcgagatcgcttagccgcgctttaaaaaggtttgcatcagctgtgagtccatctgacaagcgaggaaactaaggctgagaagtgggaggcgttgccatctgcaggcccaggcaacctgctacgggaagaccggggaccaagacctctgggttggctttcctagacccgctcgggtcttcgggtgtcgcgaggaagggccctgctcctttcgttccctgcacccctggccgctgcaggtggctccctggaggaggagctcccacgcggaggaggagccagggcagctgggagcggggacaccatcctcctggataagaggcagaggccgggaggaaccccgtcagccgggcgggcaggaagctctgggagtagcctcatggaagagaagcagatcctgtgcgtggggctagtggtgctggacgtcatcagcctggtggacaagtaccctaaggaggactcggagataaggtgtttgtcccagagatggcagcgcggaggcaacgcgtccaactcctgcaccgttctctccctgctcggagccccctgtgccttcatgggctcaatggctcctggccatgttgctgagagcctgccagatgtgtctgctacagactttgagaaggttgatctgacccagttcaagtggatccacattgagggccggaacgcatcggagcaggtgaagatgctgcagcggatagacgcacacaacaccaggcagcctccagagcagaagatccgggtgtccgtggaggtggagaagccacgagaggagctcttccagctgtttggctacggagacgtggtgtttgtcagcaaagatgtggccaagcacttggggttccagtcagcagaggaagccttgaggggcttgtatggtcgtgtgaggaaaggggctgtgcttgtctgtgcctgggctgaggagggcgccgacgccctgggccctgatggcaaattgctccactcggatgctttcccgccaccccgcgtggtggatacactgggagctggagacaccttcaatgcctccgtcatcttcagcctctcccaggggaggagcgtgcaggaagcactgagattcgggtgccaggtggccggcaagaagtgtggcctgcagggctttgatggcatcgtgtgagagcaggtgccggctcctcacacaccatggagactaccattgcggctgcatcgccttctcccctccatccagcctggcgtccaggttgccctgttcaggggacagatgcaagctgtggggaggactctgcctgtgtcctgtgttccccacagggagaggctctggggggatggctgggggatgcagagcctcagagcaaataaatcttcctcagagccagcttctcctctcaatgtctgaactgctctggctgggcattcctgaggctctgactcttcgatcctccctctttgtgtccattccccaaattaacctctccgcccaggcccagaggaggggctgcctgggctagagcagcgagaagtgccctgggcttgccaccagctctgccctggctggggaggacactcggtgccccacacccagtgaacctgccaaagaaaccgtgagagctcttcggggccctgcgttgtgcagactctattcccacagctcagaagctgggagtccacaccgctgagctgaactgacaggccagtggggggcaggggtgcgcctcctctgccctgcccaccagcctgtgatttgatggggtcttcattgtccagaaatacctcctcccgctgactgccccagagcctgaaagtctcacccttggagcccaccttggaattaagggcgtgcctcagccacaaatgtgacccaggatacagagtgttgctgtcctcagggaggtccgatctggaacacatattggaattggggccaactccaatatagggtgggtaaggccttataatgtaaagagcatataatgtaaagggctttagagtgagacagacctggattaaaatctgccatttaattagctgcatatcaccttagggtacagcacttaacgcaatctgcctcaatttcttcatctgtcaaatggaaccaattctgcttggctacagaattattgtgaggataaaatcatatataaaatgcccagcatga

SEQ ID NO: 2 - DNA, 2283 bp, Homo sapiens
  source 1..2283: mol_type = genomic DNA
tcatgctgggcattttatatatgattttatcctcacaataattctgtagccaagcagaattggttccatttgacagatgaagaaattgaggcagattgcgttaagtgctgtaccctaaggtgatatgcagctaattaaatggcagattttaatccaggtctgtctcactctaaagccctttacattatatgctctttacattataaggccttacccaccctatattggagttggccccaattccaatatgtgttccagatcggacctccctgaggacagcaacactctgtatcctgggtcacatttgtggctgaggcacgcccttaattccaaggtgggctccaagggtgagactttcaggctctggggcagtcagcgggaggaggtatttctggacaatgaagaccccatcaaatcacaggctggtgggcagggcagaggaggcgcacccctgccccccactggcctgtcagttcagctcagcggtgtggactcccagcttctgagctgtgggaatagagtctgcacaacgcagggccccgaagagctctcacggtttctttggcaggttcactgggtgtggggcaccgagtgtcctccccagccagggcagagctggtggcaagcccagggcacttctcgctgctctagcccaggcagcccctcctctgggcctgggcggagaggttaatttggggaatggacacaaagagggaggatcgaagagtcagagcctcaggaatgcccagccagagcagttcagacattgagaggagaagctggctctgaggaagatttatttgctctgaggctctgcatcccccagccatccccccagagcctctccctgtggggaacacaggacacaggcagagtcctccccacagcttgcatctgtcccctgaacagggcaacctggacgccaggctggatggaggggagaaggcgatgcagccgcaatggtagtctccatggtgtgtgaggagccggcacctgctctcacacgatgccatcaaagccctgcaggccacacttcttgccggccacctggcacccgaatctcagtgcttcctgcacgctcctcccctgggagaggctgaagatgacggaggcattgaaggtgtctccagctcccagtgtatccaccacgcggggtggcgggaaagcatccgagtggagcaatttgccatcagggcccagggcgtcggcgccctcctcagcccaggcacagacaagcacagcccctttcctcacacgaccatacaagcccctcaaggcttcctctgctgactggaaccccaagtgcttggccacatctttgctgacaaacaccacgtctccgtagccaaacagctggaagagctcctctcgtggcttctccacctccacggacacccggatcttctgctctggaggctgcctggtgttgtgtgcgtctatccgctgcagcatcttcacctgctccgatgcgttccggccctcaatgtggatccacttgaactgggtcagatcaaccttctcaaagtctgtagcagacacatctggcaggctctcagcaacatggccaggagccattgagcccatgaaggcacagggggctccgagcagggagagaacggtgcaggagttggacgcgttgcctccgcgctgccatctctgggacaaacaccttatctccgagtcctccttagggtacttgtccaccaggctgatgacgtccagcaccactagccccacgcacaggatctgcttctcttccatgaggctactcccagagcttcctgcccgcccggctgacggggttcctcccggcctctgcctcttatccaggaggatggtgtccccgctcccagctgccctggctcctcctccgcgtgggagctcctcctccagggagccacctgcagcggccaggggtgcagggaacgaaaggagcagggcccttcctcgcgacacccgaagacccgagcgggtctaggaaagccaacccagaggtcttggtccccggtcttcccgtagcaggttgcctgggcctgcagatggcaacgcctcccacttctcagccttagtttcctcgcttgtcagatggactcacagctgatgcaaacctttttaaagcgcggctaagcgatctcgagaatgcaaagagaaaatgcgctacttgccccgcactctcctgcacctgcgtctccgactcccgacccgggacacgcgaggtacagctgggcctcgcatctgcagccctgcctgaagcccgcggtcgcggcggccccgccccgcccc

SEQ ID NO: 3 - DNA, 1999 bp, Homo sapiens
  source 1..1999: mol_type = genomic DNA
accgcgggcttcaggcagggctgcagatgcgaggcccagctgtacctcgcgtgtcccgggtcgggagtcggagacgcaggtgcaggagagtgcggggcaagtagcgcattttctctttgcattctcgagatcgcttagccgcgctttaaaaaggtttgcatcagctgtgagtccatctgacaagcgaggaaactaaggctgagaagtgggaggcgttgccatctgcaggcccaggcaacctgctacgggaagaccggggaccaagacctctgggttggctttcctagacccgctcgggtcttcgggtgtcgcgaggaagggccctgctcctttcgttccctgcacccctggccgctgcaggtggctccctggaggaggagctcccacgcggaggaggagccagggcagctgggagcggggacaccatcctcctggataagaggcagaggccgggaggaaccccgtcagccgggcgggcaggaagctctgggagtagcctcatggaagagaagcagatcctgtgcgtggggctagtggtgctggacgtcatcagcctggtggacaagtaccctaaggaggactcggagataaggtgtttgtcccagagatggcagcgcggaggcaacgcgtccaactcctgcaccgttctctccctgctcggagccccctgtgccttcatgggctcaatggctcctggccatgttgctgacagttttgtcctggatgacctccgccgctattctgtggacctacgctacacagtctttcagaccacaggctccgtccccatcgccacggtcatcatcaacgaggccagtggtagccgcaccatcctatactatgacagcttcctggtggccgacttcaggcggcggggcgtggacgtgtctcaggtggcctggcagagcaagggggacacccccagctcctgctgcatcatcaacaactccaatggcaaccgtaccattgtgctccatgacacgagcctgccagatgtgtctgctacagactttgagaaggttgatctgacccagttcaagtggatccacattgagggccggaacgcatcggagcaggtgaagatgctgcagcggatagacgcacacaacaccaggcagcctccagagcagaagatccgggtgtccgtggaggtggagaagccacgagaggagctcttccagctgtttggctacggagacgtggtgggtgccccattcagcctctctttgccacttccagctaatttggttcttaaagggagccagaatccttttatcctgcctaccacaattggaatagtggttcctggtttggtggtgtttgaagatgggggatgggggttaaagcaaagaagtagacccctagccttgggctccagtgcaggcctcagcagtgagcaaggagtagaatgtctccaccccaggtgggtgcataggtgtaagaatgcccagagggcttgggtagggcttaaacagccacagggcaagcctgtgtggaagcatctcctctctggggctccccagtcttttcctctgcagaatgagggcacacaactgttctctgaggtttcttccaactcaggggtgtctggcaggttgtgggggctgctagggtgagggaagggtgggaaggagacttgcatgagtctctttttgaaaaggctggatgtaaatggaatttgggaagtaatcccagcatcatagcagaagttggttggagaccatccagccaaggtcctcaaccttgtgacttgtcctcaaccttggctgcatattaaaaaagatgaatgcaggccaagtgtagtggctcacacttgtaatcccagagctttgggaagctgaggtaggaggattgcttgatgccaggagtccaagaccagcctggacaacatagcaagacccctgtctctatgaaaataaattaggccaagagcagtgactcatacctgtaatcccagcaccttgggaggccaatgcaggaggatcacttcagccagtca

SEQ ID NO: 4 - DNA, 1999 bp, Homo sapiens
  source 1..1999: mol_type = genomic DNA
tgactggctgaagtgatcctcctgcattggcctcccaaggtgctgggattacaggtatgagtcactgctcttggcctaatttattttcatagagacaggggtcttgctatgttgtccaggctggtcttggactcctggcatcaagcaatcctcctacctcagcttcccaaagctctgggattacaagtgtgagccactacacttggcctgcattcatcttttttaatatgcagccaaggttgaggacaagtcacaaggttgaggaccttggctggatggtctccaaccaacttctgctatgatgctgggattacttcccaaattccatttacatccagccttttcaaaaagagactcatgcaagtctccttcccacccttccctcaccctagcagcccccacaacctgccagacacccctgagttggaagaaacctcagagaacagttgtgtgccctcattctgcagaggaaaagactggggagccccagagaggagatgcttccacacaggcttgccctgtggctgtttaagccctacccaagccctctgggcattcttacacctatgcacccacctggggtggagacattctactccttgctcactgctgaggcctgcactggagcccaaggctaggggtctacttctttgctttaacccccatcccccatcttcaaacaccaccaaaccaggaaccactattccaattgtggtaggcaggataaaaggattctggctccctttaagaaccaaattagctggaagtggcaaagagaggctgaatggggcacccaccacgtctccgtagccaaacagctggaagagctcctctcgtggcttctccacctccacggacacccggatcttctgctctggaggctgcctggtgttgtgtgcgtctatccgctgcagcatcttcacctgctccgatgcgttccggccctcaatgtggatccacttgaactgggtcagatcaaccttctcaaagtctgtagcagacacatctggcaggctcgtgtcatggagcacaatggtacggttgccattggagttgttgatgatgcagcaggagctgggggtgtcccccttgctctgccaggccacctgagacacgtccacgccccgccgcctgaagtcggccaccaggaagctgtcatagtataggatggtgcggctaccactggcctcgttgatgatgaccgtggcgatggggacggagcctgtggtctgaaagactgtgtagcgtaggtccacagaatagcggcggaggtcatccaggacaaaactgtcagcaacatggccaggagccattgagcccatgaaggcacagggggctccgagcagggagagaacggtgcaggagttggacgcgttgcctccgcgctgccatctctgggacaaacaccttatctccgagtcctccttagggtacttgtccaccaggctgatgacgtccagcaccactagccccacgcacaggatctgcttctcttccatgaggctactcccagagcttcctgcccgcccggctgacggggttcctcccggcctctgcctcttatccaggaggatggtgtccccgctcccagctgccctggctcctcctccgcgtgggagctcctcctccagggagccacctgcagcggccaggggtgcagggaacgaaaggagcagggcccttcctcgcgacacccgaagacccgagcgggtctaggaaagccaacccagaggtcttggtccccggtcttcccgtagcaggttgcctgggcctgcagatggcaacgcctcccacttctcagccttagtttcctcgcttgtcagatggactcacagctgatgcaaacctttttaaagcgcggctaagcgatctcgagaatgcaaagagaaaatgcgctacttgccccgcactctcctgcacctgcgtctccgactcccgacccgggacacgcgaggtacagctgggcctcgcatctgcagccctgcctgaagcccgcggt

SEQ ID NO: 5 - DNA, 1996 bp, Homo sapiens
  source 1..1996: mol_type = genomic DNA
accgcgggcttcaggcagggctgcagatgcgaggcccagctgtacctcgcgtgtcccgggtcgggagtcggagacgcaggtgcaggagagtgcggggcaagtagcgcattttctctttgcattctcgagatcgcttagccgcgctttaaaaaggtttgcatcagctgtgagtccatctgacaagcgaggaaactaaggctgagaagtgggaggcgttgccatctgcaggcccaggcaacctgctacgggaagaccggggaccaagacctctgggttggctttcctagacccgctcgggtcttcgggtgtcgcgaggaagggccctgctcctttcgttccctgcacccctggccgctgcaggtggctccctggaggaggagctcccacgcggaggaggagccagggcagctgggagcggggacaccatcctcctggataagaggcagaggccgggaggaaccccgtcagccgggcgggcaggaagctctgggagtagcctcatggaagagaagcagatcctgtgcgtggggctagtggtgctggacgtcatcagcctggtggacaagtaccctaaggaggactcggagataaggtgtttgtcccagagatggcagcgcggaggcaacgcgtccaactcctgcaccgttctctccctgctcggagccccctgtgccttcatgggctcaatggctcctggccatgttgctgattttgtcctggatgacctccgccgctattctgtggacctacgctacacagtctttcagaccacaggctccgtccccatcgccacggtcatcatcaacgaggccagtggtagccgcaccatcctatactatgacagcttcctggtggccgacttcaggcggcggggcgtggacgtgtctcaggtggcctggcagagcaagggggacacccccagctcctgctgcatcatcaacaactccaatggcaaccgtaccattgtgctccatgacacgagcctgccagatgtgtctgctacagactttgagaaggttgatctgacccagttcaagtggatccacattgagggccggaacgcatcggagcaggtgaagatgctgcagcggatagacgcacacaacaccaggcagcctccagagcagaagatccgggtgtccgtggaggtggagaagccacgagaggagctcttccagctgtttggctacggagacgtggtgggtgccccattcagcctctctttgccacttccagctaatttggttcttaaagggagccagaatccttttatcctgcctaccacaattggaatagtggttcctggtttggtggtgtttgaagatgggggatgggggttaaagcaaagaagtagacccctagccttgggctccagtgcaggcctcagcagtgagcaaggagtagaatgtctccaccccaggtgggtgcataggtgtaagaatgcccagagggcttgggtagggcttaaacagccacagggcaagcctgtgtggaagcatctcctctctggggctccccagtcttttcctctgcagaatgagggcacacaactgttctctgaggtttcttccaactcaggggtgtctggcaggttgtgggggctgctagggtgagggaagggtgggaaggagacttgcatgagtctctttttgaaaaggctggatgtaaatggaatttgggaagtaatcccagcatcatagcagaagttggttggagaccatccagccaaggtcctcaaccttgtgacttgtcctcaaccttggctgcatattaaaaaagatgaatgcaggccaagtgtagtggctcacacttgtaatcccagagctttgggaagctgaggtaggaggattgcttgatgccaggagtccaagaccagcctggacaacatagcaagacccctgtctctatgaaaataaattaggccaagagcagtgactcatacctgtaatcccagcaccttgggaggccaatgcaggaggatcacttcagccagtca

SEQ ID NO: 6 - DNA, 1996 bp, Homo sapiens
  source 1..1996: mol_type = genomic DNA
tgactggctgaagtgatcctcctgcattggcctcccaaggtgctgggattacaggtatgagtcactgctcttggcctaatttattttcatagagacaggggtcttgctatgttgtccaggctggtcttggactcctggcatcaagcaatcctcctacctcagcttcccaaagctctgggattacaagtgtgagccactacacttggcctgcattcatcttttttaatatgcagccaaggttgaggacaagtcacaaggttgaggaccttggctggatggtctccaaccaacttctgctatgatgctgggattacttcccaaattccatttacatccagccttttcaaaaagagactcatgcaagtctccttcccacccttccctcaccctagcagcccccacaacctgccagacacccctgagttggaagaaacctcagagaacagttgtgtgccctcattctgcagaggaaaagactggggagccccagagaggagatgcttccacacaggcttgccctgtggctgtttaagccctacccaagccctctgggcattcttacacctatgcacccacctggggtggagacattctactccttgctcactgctgaggcctgcactggagcccaaggctaggggtctacttctttgctttaacccccatcccccatcttcaaacaccaccaaaccaggaaccactattccaattgtggtaggcaggataaaaggattctggctccctttaagaaccaaattagctggaagtggcaaagagaggctgaatggggcacccaccacgtctccgtagccaaacagctggaagagctcctctcgtggcttctccacctccacggacacccggatcttctgctctggaggctgcctggtgttgtgtgcgtctatccgctgcagcatcttcacctgctccgatgcgttccggccctcaatgtggatccacttgaactgggtcagatcaaccttctcaaagtctgtagcagacacatctggcaggctcgtgtcatggagcacaatggtacggttgccattggagttgttgatgatgcagcaggagctgggggtgtcccccttgctctgccaggccacctgagacacgtccacgccccgccgcctgaagtcggccaccaggaagctgtcatagtataggatggtgcggctaccactggcctcgttgatgatgaccgtggcgatggggacggagcctgtggtctgaaagactgtgtagcgtaggtccacagaatagcggcggaggtcatccaggacaaaatcagcaacatggccaggagccattgagcccatgaaggcacagggggctccgagcagggagagaacggtgcaggagttggacgcgttgcctccgcgctgccatctctgggacaaacaccttatctccgagtcctccttagggtacttgtccaccaggctgatgacgtccagcaccactagccccacgcacaggatctgcttctcttccatgaggctactcccagagcttcctgcccgcccggctgacggggttcctcccggcctctgcctcttatccaggaggatggtgtccccgctcccagctgccctggctcctcctccgcgtgggagctcctcctccagggagccacctgcagcggccaggggtgcagggaacgaaaggagcagggcccttcctcgcgacacccgaagacccgagcgggtctaggaaagccaacccagaggtcttggtccccggtcttcccgtagcaggttgcctgggcctgcagatggcaacgcctcccacttctcagccttagtttcctcgcttgtcagatggactcacagctgatgcaaacctttttaaagcgcggctaagcgatctcgagaatgcaaagagaaaatgcgctacttgccccgcactctcctgcacctgcgtctccgactcccgacccgggacacgcgaggtacagctgggcctcgcatctgcagccctgcctgaagcccgcggt

SEQ ID NO: 7 - DNA, 2534 bp, Homo sapiens
  source 1..2534: mol_type = genomic DNA
accgcgggcttcaggcagggctgcagatgcgaggcccagctgtacctcgcgtgtcccgggtcgggagtcggagacgcaggtgcaggagagtgcggggcaagtagcgcattttctctttgcattctcgagatcgcttagccgcgctttaaaaaggtttgcatcagctgtgagtccatctgacaagcgaggaaactaaggctgagaagtgggaggcgttgccatctgcaggcccaggcaacctgctacgggaagaccggggaccaagacctctgggttggctttcctagacccgctcgggtcttcgggtgtcgcgaggaagggccctgctcctttcgttccctgcacccctggccgctgcaggtggctccctggaggaggagctcccacgcggaggaggagccagggcagctgggagcggggacaccatcctcctggataagaggcagaggccgggaggaaccccgtcagccgggcgggcaggaagctctgggagtagcctcatggaagagaagcagatcctgtgcgtggggctagtggtgctggacgtcatcagcctggtggacaagtaccctaaggaggactcggagataaggtgtttgtcccagagatggcagcgcggaggcaacgcgtccaactcctgcaccgttctctccctgctcggagccccctgtgccttcatgggctcaatggctcctggccatgttgctgacagttttgtcctggatgacctccgccgctattctgtggacctacgctacacagtctttcagaccacaggctccgtccccatcgccacggtcatcatcaacgaggccagtggtagccgcaccatcctatactatgacagcttcctggtggccgacttcaggcggcggggcgtggacgtgtctcaggtggcctggcagagcaagggggacacccccagctcctgctgcatcatcaacaactccaatggcaaccgtaccattgtgctccatgacacgagcctgccagatgtgtctgctacagactttgagaaggttgatctgacccagttcaagtggatccacattgagggccggaacgcatcggagcaggtgaagatgctgcagcggatagacgcacacaacaccaggcagcctccagagcagaagatccgggtgtccgtggaggtggagaagccacgagaggagctcttccagctgtttggctacggagacgtggtgtttgtcagcaaagatgtggccaagcacttggggttccagtcagcagaggaagccttgaggggcttgtatggtcgtgtgaggaaaggggctgtgcttgtctgtgcctgggctgaggagggcgccgacgccctgggccctgatggcaaattgctccactcggatgctttcccgccaccccgcgtggtggatacactgggagctggagacaccttcaatgcctccgtcatcttcagcctctcccaggggaggagcgtgcaggaagcactgagattcgggtgccaggtggccggcaagaagtgtggcctgcagggctttgatggcatcgtgtgagagcaggtgccggctcctcacacaccatggagactaccattgcggctgcatcgccttctcccctccatccagcctggcgtccaggttgccctgttcaggggacagatgcaagctgtggggaggactctgcctgtgtcctgtgttccccacagggagaggctctggggggatggctgggggatgcagagcctcagagcaaataaatcttcctcagagccagcttctcctctcaatgtctgaactgctctggctgggcattcctgaggctctgactcttcgatcctccctctttgtgtccattccccaaattaacctctccgcccaggcccagaggaggggctgcctgggctagagcagcgagaagtgccctgggcttgccaccagctctgccctggctggggaggacactcggtgccccacacccagtgaacctgccaaagaaaccgtgagagctcttcggggccctgcgttgtgcagactctattcccacagctcagaagctgggagtccacaccgctgagctgaactgacaggccagtggggggcaggggtgcgcctcctctgccctgcccaccagcctgtgatttgatggggtcttcattgtccagaaatacctcctcccgctgactgccccagagcctgaaagtctcacccttggagcccaccttggaattaagggcgtgcctcagccacaaatgtgacccaggatacagagtgttgctgtcctcagggaggtccgatctggaacacatattggaattggggccaactccaatatagggtgggtaaggccttataatgtaaagagcatataatgtaaagggctttagagtgagacagacctggattaaaatctgccatttaattagctgcatatcaccttagggtacagcacttaacgcaatctgcctcaatttcttcatctgtcaaatggaaccaattctgcttggctacagaattattgtgaggataaaatcatatataaaatgcccagcatga

SEQ ID NO: 8 - DNA, 2534 bp, Homo sapiens
  source 1..2534: mol_type = genomic DNA
tcatgctgggcattttatatatgattttatcctcacaataattctgtagccaagcagaattggttccatttgacagatgaagaaattgaggcagattgcgttaagtgctgtaccctaaggtgatatgcagctaattaaatggcagattttaatccaggtctgtctcactctaaagccctttacattatatgctctttacattataaggccttacccaccctatattggagttggccccaattccaatatgtgttccagatcggacctccctgaggacagcaacactctgtatcctgggtcacatttgtggctgaggcacgcccttaattccaaggtgggctccaagggtgagactttcaggctctggggcagtcagcgggaggaggtatttctggacaatgaagaccccatcaaatcacaggctggtgggcagggcagaggaggcgcacccctgccccccactggcctgtcagttcagctcagcggtgtggactcccagcttctgagctgtgggaatagagtctgcacaacgcagggccccgaagagctctcacggtttctttggcaggttcactgggtgtggggcaccgagtgtcctccccagccagggcagagctggtggcaagcccagggcacttctcgctgctctagcccaggcagcccctcctctgggcctgggcggagaggttaatttggggaatggacacaaagagggaggatcgaagagtcagagcctcaggaatgcccagccagagcagttcagacattgagaggagaagctggctctgaggaagatttatttgctctgaggctctgcatcccccagccatccccccagagcctctccctgtggggaacacaggacacaggcagagtcctccccacagcttgcatctgtcccctgaacagggcaacctggacgccaggctggatggaggggagaaggcgatgcagccgcaatggtagtctccatggtgtgtgaggagccggcacctgctctcacacgatgccatcaaagccctgcaggccacacttcttgccggccacctggcacccgaatctcagtgcttcctgcacgctcctcccctgggagaggctgaagatgacggaggcattgaaggtgtctccagctcccagtgtatccaccacgcggggtggcgggaaagcatccgagtggagcaatttgccatcagggcccagggcgtcggcgccctcctcagcccaggcacagacaagcacagcccctttcctcacacgaccatacaagcccctcaaggcttcctctgctgactggaaccccaagtgcttggccacatctttgctgacaaacaccacgtctccgtagccaaacagctggaagagctcctctcgtggcttctccacctccacggacacccggatcttctgctctggaggctgcctggtgttgtgtgcgtctatccgctgcagcatcttcacctgctccgatgcgttccggccctcaatgtggatccacttgaactgggtcagatcaaccttctcaaagtctgtagcagacacatctggcaggctcgtgtcatggagcacaatggtacggttgccattggagttgttgatgatgcagcaggagctgggggtgtcccccttgctctgccaggccacctgagacacgtccacgccccgccgcctgaagtcggccaccaggaagctgtcatagtataggatggtgcggctaccactggcctcgttgatgatgaccgtggcgatggggacggagcctgtggtctgaaagactgtgtagcgtaggtccacagaatagcggcggaggtcatccaggacaaaactgtcagcaacatggccaggagccattgagcccatgaaggcacagggggctccgagcagggagagaacggtgcaggagttggacgcgttgcctccgcgctgccatctctgggacaaacaccttatctccgagtcctccttagggtacttgtccaccaggctgatgacgtccagcaccactagccccacgcacaggatctgcttctcttccatgaggctactcccagagcttcctgcccgcccggctgacggggttcctcccggcctctgcctcttatccaggaggatggtgtccccgctcccagctgccctggctcctcctccgcgtgggagctcctcctccagggagccacctgcagcggccaggggtgcagggaacgaaaggagcagggcccttcctcgcgacacccgaagacccgagcgggtctaggaaagccaacccagaggtcttggtccccggtcttcccgtagcaggttgcctgggcctgcagatggcaacgcctcccacttctcagccttagtttcctcgcttgtcagatggactcacagctgatgcaaacctttttaaagcgcggctaagcgatctcgagaatgcaaagagaaaatgcgctacttgccccgcactctcctgcacctgcgtctccgactcccgacccgggacacgcgaggtacagctgggcctcgcatctgcagccctgcctgaagcccgcggt

SEQ ID NO: 9 - DNA, 2531 bp, Homo sapiens
  source 1..2531: mol_type = genomic DNA
accgcgggcttcaggcagggctgcagatgcgaggcccagctgtacctcgcgtgtcccgggtcgggagtcggagacgcaggtgcaggagagtgcggggcaagtagcgcattttctctttgcattctcgagatcgcttagccgcgctttaaaaaggtttgcatcagctgtgagtccatctgacaagcgaggaaactaaggctgagaagtgggaggcgttgccatctgcaggcccaggcaacctgctacgggaagaccggggaccaagacctctgggttggctttcctagacccgctcgggtcttcgggtgtcgcgaggaagggccctgctcctttcgttccctgcacccctggccgctgcaggtggctccctggaggaggagctcccacgcggaggaggagccagggcagctgggagcggggacaccatcctcctggataagaggcagaggccgggaggaaccccgtcagccgggcgggcaggaagctctgggagtagcctcatggaagagaagcagatcctgtgcgtggggctagtggtgctggacgtcatcagcctggtggacaagtaccctaaggaggactcggagataaggtgtttgtcccagagatggcagcgcggaggcaacgcgtccaactcctgcaccgttctctccctgctcggagccccctgtgccttcatgggctcaatggctcctggccatgttgctgattttgtcctggatgacctccgccgctattctgtggacctacgctacacagtctttcagaccacaggctccgtccccatcgccacggtcatcatcaacgaggccagtggtagccgcaccatcctatactatgacagcttcctggtggccgacttcaggcggcggggcgtggacgtgtctcaggtggcctggcagagcaagggggacacccccagctcctgctgcatcatcaacaactccaatggcaaccgtaccattgtgctccatgacacgagcctgccagatgtgtctgctacagactttgagaaggttgatctgacccagttcaagtggatccacattgagggccggaacgcatcggagcaggtgaagatgctgcagcggatagacgcacacaacaccaggcagcctccagagcagaagatccgggtgtccgtggaggtggagaagccacgagaggagctcttccagctgtttggctacggagacgtggtgtttgtcagcaaagatgtggccaagcacttggggttccagtcagcagaggaagccttgaggggcttgtatggtcgtgtgaggaaaggggctgtgcttgtctgtgcctgggctgaggagggcgccgacgccctgggccctgatggcaaattgctccactcggatgctttcccgccaccccgcgtggtggatacactgggagctggagacaccttcaatgcctccgtcatcttcagcctctcccaggggaggagcgtgcaggaagcactgagattcgggtgccaggtggccggcaagaagtgtggcctgcagggctttgatggcatcgtgtgagagcaggtgccggctcctcacacaccatggagactaccattgcggctgcatcgccttctcccctccatccagcctggcgtccaggttgccctgttcaggggacagatgcaagctgtggggaggactctgcctgtgtcctgtgttccccacagggagaggctctggggggatggctgggggatgcagagcctcagagcaaataaatcttcctcagagccagcttctcctctcaatgtctgaactgctctggctgggcattcctgaggctctgactcttcgatcctccctctttgtgtccattccccaaattaacctctccgcccaggcccagaggaggggctgcctgggctagagcagcgagaagtgccctgggcttgccaccagctctgccctggctggggaggacactcggtgccccacacccagtgaacctgccaaagaaaccgtgagagctcttcggggccctgcgttgtgcagactctattcccacagctcagaagctgggagtccacaccgctgagctgaactgacaggccagtggggggcaggggtgcgcctcctctgccctgcccaccagcctgtgatttgatggggtcttcattgtccagaaatacctcctcccgctgactgccccagagcctgaaagtctcacccttggagcccaccttggaattaagggcgtgcctcagccacaaatgtgacccaggatacagagtgttgctgtcctcagggaggtccgatctggaacacatattggaattggggccaactccaatatagggtgggtaaggccttataatgtaaagagcatataatgtaaagggctttagagtgagacagacctggattaaaatctgccatttaattagctgcatatcaccttagggtacagcacttaacgcaatctgcctcaatttcttcatctgtcaaatggaaccaattctgcttggctacagaattattgtgaggataaaatcatatataaaatgcccagcatga

SEQ ID NO: 10 - DNA, 2531 bp, Homo sapiens
  source 1..2531: mol_type = genomic DNA
tcatgctgggcattttatatatgattttatcctcacaataattctgtagccaagcagaattggttccatttgacagatgaagaaattgaggcagattgcgttaagtgctgtaccctaaggtgatatgcagctaattaaatggcagattttaatccaggtctgtctcactctaaagccctttacattatatgctctttacattataaggccttacccaccctatattggagttggccccaattccaatatgtgttccagatcggacctccctgaggacagcaacactctgtatcctgggtcacatttgtggctgaggcacgcccttaattccaaggtgggctccaagggtgagactttcaggctctggggcagtcagcgggaggaggtatttctggacaatgaagaccccatcaaatcacaggctggtgggcagggcagaggaggcgcacccctgccccccactggcctgtcagttcagctcagcggtgtggactcccagcttctgagctgtgggaatagagtctgcacaacgcagggccccgaagagctctcacggtttctttggcaggttcactgggtgtggggcaccgagtgtcctccccagccagggcagagctggtggcaagcccagggcacttctcgctgctctagcccaggcagcccctcctctgggcctgggcggagaggttaatttggggaatggacacaaagagggaggatcgaagagtcagagcctcaggaatgcccagccagagcagttcagacattgagaggagaagctggctctgaggaagatttatttgctctgaggctctgcatcccccagccatccccccagagcctctccctgtggggaacacaggacacaggcagagtcctccccacagcttgcatctgtcccctgaacagggcaacctggacgccaggctggatggaggggagaaggcgatgcagccgcaatggtagtctccatggtgtgtgaggagccggcacctgctctcacacgatgccatcaaagccctgcaggccacacttcttgccggccacctggcacccgaatctcagtgcttcctgcacgctcctcccctgggagaggctgaagatgacggaggcattgaaggtgtctccagctcccagtgtatccaccacgcggggtggcgggaaagcatccgagtggagcaatttgccatcagggcccagggcgtcggcgccctcctcagcccaggcacagacaagcacagcccctttcctcacacgaccatacaagcccctcaaggcttcctctgctgactggaaccccaagtgcttggccacatctttgctgacaaacaccacgtctccgtagccaaacagctggaagagctcctctcgtggcttctccacctccacggacacccggatcttctgctctggaggctgcctggtgttgtgtgcgtctatccgctgcagcatcttcacctgctccgatgcgttccggccctcaatgtggatccacttgaactgggtcagatcaaccttctcaaagtctgtagcagacacatctggcaggctcgtgtcatggagcacaatggtacggttgccattggagttgttgatgatgcagcaggagctgggggtgtcccccttgctctgccaggccacctgagacacgtccacgccccgccgcctgaagtcggccaccaggaagctgtcatagtataggatggtgcggctaccactggcctcgttgatgatgaccgtggcgatggggacggagcctgtggtctgaaagactgtgtagcgtaggtccacagaatagcggcggaggtcatccaggacaaaatcagcaacatggccaggagccattgagcccatgaaggcacagggggctccgagcagggagagaacggtgcaggagttggacgcgttgcctccgcgctgccatctctgggacaaacaccttatctccgagtcctccttagggtacttgtccaccaggctgatgacgtccagcaccactagccccacgcacaggatctgcttctcttccatgaggctactcccagagcttcctgcccgcccggctgacggggttcctcccggcctctgcctcttatccaggaggatggtgtccccgctcccagctgccctggctcctcctccgcgtgggagctcctcctccagggagccacctgcagcggccaggggtgcagggaacgaaaggagcagggcccttcctcgcgacacccgaagacccgagcgggtctaggaaagccaacccagaggtcttggtccccggtcttcccgtagcaggttgcctgggcctgcagatggcaacgcctcccacttctcagccttagtttcctcgcttgtcagatggactcacagctgatgcaaacctttttaaagcgcggctaagcgatctcgagaatgcaaagagaaaatgcgctacttgccccgcactctcctgcacctgcgtctccgactcccgacccgggacacgcgaggtacagctgggcctcgcatctgcagccctgcctgaagcccgcggt

SEQ ID NO: 11 - DNA, 1864 bp, Homo sapiens
  source 1..1864: mol_type = genomic DNA
accgcgggcttcaggcagggctgcagatgcgaggcccagctgtacctcgcgtgtcccgggtcgggagtcggagacgcaggtgcaggagagtgcggggcaagtagcgcattttctctttgcattctcgagatcgcttagccgcgctttaaaaaggtttgcatcagctgtgagtccatctgacaagcgaggaaactaaggctgagaagtgggaggcgttgccatctgcaggcccaggcaacctgctacgggaagaccggggaccaagacctctgggttggctttcctagacccgctcgggtcttcgggtgtcgcgaggaagggccctgctcctttcgttccctgcacccctggccgctgcaggtggctccctggaggaggagctcccacgcggaggaggagccagggcagctgggagcggggacaccatcctcctggataagaggcagaggccgggaggaaccccgtcagccgggcgggcaggaagctctgggagtagcctcatggaagagaagcagatcctgtgcgtggggctagtggtgctggacgtcatcagcctggtggacaagtaccctaaggaggactcggagataaggtgtttgtcccagagatggcagcgcggaggcaacgcgtccaactcctgcaccgttctctccctgctcggagccccctgtgccttcatgggctcaatggctcctggccatgttgctgacagttttgtcctggatgacctccgccgctattctgtggacctacgctacacagtctttcagaccacaggctccgtccccatcgccacggtcatcatcaacgaggccagtggtagccgcaccatcctatactatgacaggagcctgccagatgtgtctgctacagactttgagaaggttgatctgacccagttcaagtggatccacattgagggccggaacgcatcggagcaggtgaagatgctgcagcggatagacgcacacaacaccaggcagcctccagagcagaagatccgggtgtccgtggaggtggagaagccacgagaggagctcttccagctgtttggctacggagacgtggtgggtgccccattcagcctctctttgccacttccagctaatttggttcttaaagggagccagaatccttttatcctgcctaccacaattggaatagtggttcctggtttggtggtgtttgaagatgggggatgggggttaaagcaaagaagtagacccctagccttgggctccagtgcaggcctcagcagtgagcaaggagtagaatgtctccaccccaggtgggtgcataggtgtaagaatgcccagagggcttgggtagggcttaaacagccacagggcaagcctgtgtggaagcatctcctctctggggctccccagtcttttcctctgcagaatgagggcacacaactgttctctgaggtttcttccaactcaggggtgtctggcaggttgtgggggctgctagggtgagggaagggtgggaaggagacttgcatgagtctctttttgaaaaggctggatgtaaatggaatttgggaagtaatcccagcatcatagcagaagttggttggagaccatccagccaaggtcctcaaccttgtgacttgtcctcaaccttggctgcatattaaaaaagatgaatgcaggccaagtgtagtggctcacacttgtaatcccagagctttgggaagctgaggtaggaggattgcttgatgccaggagtccaagaccagcctggacaacatagcaagacccctgtctctatgaaaataaattaggccaagagcagtgactcatacctgtaatcccagcaccttgggaggccaatgcaggaggatcacttcagccagtca

SEQ ID NO: 12 - DNA, 1864 bp, Homo sapiens
  source 1..1864: mol_type = genomic DNA
tgactggctgaagtgatcctcctgcattggcctcccaaggtgctgggattacaggtatgagtcactgctcttggcctaatttattttcatagagacaggggtcttgctatgttgtccaggctggtcttggactcctggcatcaagcaatcctcctacctcagcttcccaaagctctgggattacaagtgtgagccactacacttggcctgcattcatcttttttaatatgcagccaaggttgaggacaagtcacaaggttgaggaccttggctggatggtctccaaccaacttctgctatgatgctgggattacttcccaaattccatttacatccagccttttcaaaaagagactcatgcaagtctccttcccacccttccctcaccctagcagcccccacaacctgccagacacccctgagttggaagaaacctcagagaacagttgtgtgccctcattctgcagaggaaaagactggggagccccagagaggagatgcttccacacaggcttgccctgtggctgtttaagccctacccaagccctctgggcattcttacacctatgcacccacctggggtggagacattctactccttgctcactgctgaggcctgcactggagcccaaggctaggggtctacttctttgctttaacccccatcccccatcttcaaacaccaccaaaccaggaaccactattccaattgtggtaggcaggataaaaggattctggctccctttaagaaccaaattagctggaagtggcaaagagaggctgaatggggcacccaccacgtctccgtagccaaacagctggaagagctcctctcgtggcttctccacctccacggacacccggatcttctgctctggaggctgcctggtgttgtgtgcgtctatccgctgcagcatcttcacctgctccgatgcgttccggccctcaatgtggatccacttgaactgggtcagatcaaccttctcaaagtctgtagcagacacatctggcaggctcctgtcatagtataggatggtgcggctaccactggcctcgttgatgatgaccgtggcgatggggacggagcctgtggtctgaaagactgtgtagcgtaggtccacagaatagcggcggaggtcatccaggacaaaactgtcagcaacatggccaggagccattgagcccatgaaggcacagggggctccgagcagggagagaacggtgcaggagttggacgcgttgcctccgcgctgccatctctgggacaaacaccttatctccgagtcctccttagggtacttgtccaccaggctgatgacgtccagcaccactagccccacgcacaggatctgcttctcttccatgaggctactcccagagcttcctgcccgcccggctgacggggttcctcccggcctctgcctcttatccaggaggatggtgtccccgctcccagctgccctggctcctcctccgcgtgggagctcctcctccagggagccacctgcagcggccaggggtgcagggaacgaaaggagcagggcccttcctcgcgacacccgaagacccgagcgggtctaggaaagccaacccagaggtcttggtccccggtcttcccgtagcaggttgcctgggcctgcagatggcaacgcctcccacttctcagccttagtttcctcgcttgtcagatggactcacagctgatgcaaacctttttaaagcgcggctaagcgatctcgagaatgcaaagagaaaatgcgctacttgccccgcactctcctgcacctgcgtctccgactcccgacccgggacacgcgaggtacagctgggcctcgcatctgcagccctgcctgaagcccgcggt

SEQ ID NO: 13 - DNA, 1829 bp, Homo sapiens
  source 1..1829: mol_type = genomic DNA
ggcccagctgtacctcgcgtgtcccgggtcgggagtcggagacgcaggtgcaggagagtgcggggcaagtagcgcattttctctttgcattctcgagatcgcttagccgcgctttaaaaaggtttgcatcagctgtgagtccatctgacaagcgaggaaactaaggctgagaagtgggaggcgttgccatctgcaggcccaggcaacctgctacgggaagaccggggaccaagacctctgggttggctttcctagacccgctcgggtcttcgggtgtcgcgaggaagggccctgctcctttcgttccctgcacccctggccgctgcaggtggctccctggaggaggagctcccacgcggaggaggagccagggcagctgggagcggggacaccatcctcctggataagaggcagaggccgggaggaaccccgtcagccgggcgggcaggaagctctgggagtagcctcatggaagagaagcagatcctgtgcgtggggctagtggtgctggacgtcatcagcctggtggacaagtaccctaaggaggactcggagataaggtgtttgtcccagagatggcagcgcggaggcaacgcgtccaactcctgcaccgttctctccctgctcggagccccctgtgccttcatgggctcaatggctcctggccatgttgctgacttcctggtggccgacttcaggcggcggggcgtggacgtgtctcaggtggcctggcagagcaagggggacacccccagctcctgctgcatcatcaacaactccaatggcaaccgtaccattgtgctccatgacacgagcctgccagatgtgtctgctacagactttgagaaggttgatctgacccagttcaagtggatccacattgagggccggaacgcatcggagcaggtgaagatgctgcagcggatagacgcacacaacaccaggcagcctccagagcagaagatccgggtgtccgtggaggtggagaagccacgagaggagctcttccagctgtttggctacggagacgtggtgggtgccccattcagcctctctttgccacttccagctaatttggttcttaaagggagccagaatccttttatcctgcctaccacaattggaatagtggttcctggtttggtggtgtttgaagatgggggatgggggttaaagcaaagaagtagacccctagccttgggctccagtgcaggcctcagcagtgagcaaggagtagaatgtctccaccccaggtgggtgcataggtgtaagaatgcccagagggcttgggtagggcttaaacagccacagggcaagcctgtgtggaagcatctcctctctggggctccccagtcttttcctctgcagaatgagggcacacaactgttctctgaggtttcttccaactcaggggtgtctggcaggttgtgggggctgctagggtgagggaagggtgggaaggagacttgcatgagtctctttttgaaaaggctggatgtaaatggaatttgggaagtaatcccagcatcatagcagaagttggttggagaccatccagccaaggtcctcaaccttgtgacttgtcctcaaccttggctgcatattaaaaaagatgaatgcaggccaagtgtagtggctcacacttgtaatcccagagctttgggaagctgaggtaggaggattgcttgatgccaggagtccaagaccagcctggacaacatagcaagacccctgtctctatgaaaataaattaggccaagagcagtgactcatacctgtaatcccagcaccttgggaggccaatgcaggaggatcacttcagccagtca

SEQ ID NO: 14 - DNA, 1829 bp, Homo sapiens
  source 1..1829: mol_type = genomic DNA
tgactggctgaagtgatcctcctgcattggcctcccaaggtgctgggattacaggtatgagtcactgctcttggcctaatttattttcatagagacaggggtcttgctatgttgtccaggctggtcttggactcctggcatcaagcaatcctcctacctcagcttcccaaagctctgggattacaagtgtgagccactacacttggcctgcattcatcttttttaatatgcagccaaggttgaggacaagtcacaaggttgaggaccttggctggatggtctccaaccaacttctgctatgatgctgggattacttcccaaattccatttacatccagccttttcaaaaagagactcatgcaagtctccttcccacccttccctcaccctagcagcccccacaacctgccagacacccctgagttggaagaaacctcagagaacagttgtgtgccctcattctgcagaggaaaagactggggagccccagagaggagatgcttccacacaggcttgccctgtggctgtttaagccctacccaagccctctgggcattcttacacctatgcacccacctggggtggagacattctactccttgctcactgctgaggcctgcactggagcccaaggctaggggtctacttctttgctttaacccccatcccccatcttcaaacaccaccaaaccaggaaccactattccaattgtggtaggcaggataaaaggattctggctccctttaagaaccaaattagctggaagtggcaaagagaggctgaatggggcacccaccacgtctccgtagccaaacagctggaagagctcctctcgtggcttctccacctccacggacacccggatcttctgctctggaggctgcctggtgttgtgtgcgtctatccgctgcagcatcttcacctgctccgatgcgttccggccctcaatgtggatccacttgaactgggtcagatcaaccttctcaaagtctgtagcagacacatctggcaggctcgtgtcatggagcacaatggtacggttgccattggagttgttgatgatgcagcaggagctgggggtgtcccccttgctctgccaggccacctgagacacgtccacgccccgccgcctgaagtcggccaccaggaagtcagcaacatggccaggagccattgagcccatgaaggcacagggggctccgagcagggagagaacggtgcaggagttggacgcgttgcctccgcgctgccatctctgggacaaacaccttatctccgagtcctccttagggtacttgtccaccaggctgatgacgtccagcaccactagccccacgcacaggatctgcttctcttccatgaggctactcccagagcttcctgcccgcccggctgacggggttcctcccggcctctgcctcttatccaggaggatggtgtccccgctcccagctgccctggctcctcctccgcgtgggagctcctcctccagggagccacctgcagcggccaggggtgcagggaacgaaaggagcagggcccttcctcgcgacacccgaagacccgagcgggtctaggaaagccaacccagaggtcttggtccccggtcttcccgtagcaggttgcctgggcctgcagatggcaacgcctcccacttctcagccttagtttcctcgcttgtcagatggactcacagctgatgcaaacctttttaaagcgcggctaagcgatctcgagaatgcaaagagaaaatgcgctacttgccccgcactctcctgcacctgcgtctccgactcccgacccgggacacgcgaggtacagctgggcc

SEQ ID NO: 15 - DNA, 1861 bp, Homo sapiens
  source 1..1861: mol_type = genomic DNA
accgcgggcttcaggcagggctgcagatgcgaggcccagctgtacctcgcgtgtcccgggtcgggagtcggagacgcaggtgcaggagagtgcggggcaagtagcgcattttctctttgcattctcgagatcgcttagccgcgctttaaaaaggtttgcatcagctgtgagtccatctgacaagcgaggaaactaaggctgagaagtgggaggcgttgccatctgcaggcccaggcaacctgctacgggaagaccggggaccaagacctctgggttggctttcctagacccgctcgggtcttcgggtgtcgcgaggaagggccctgctcctttcgttccctgcacccctggccgctgcaggtggctccctggaggaggagctcccacgcggaggaggagccagggcagctgggagcggggacaccatcctcctggataagaggcagaggccgggaggaaccccgtcagccgggcgggcaggaagctctgggagtagcctcatggaagagaagcagatcctgtgcgtggggctagtggtgctggacgtcatcagcctggtggacaagtaccctaaggaggactcggagataaggtgtttgtcccagagatggcagcgcggaggcaacgcgtccaactcctgcaccgttctctccctgctcggagccccctgtgccttcatgggctcaatggctcctggccatgttgctgattttgtcctggatgacctccgccgctattctgtggacctacgctacacagtctttcagaccacaggctccgtccccatcgccacggtcatcatcaacgaggccagtggtagccgcaccatcctatactatgacaggagcctgccagatgtgtctgctacagactttgagaaggttgatctgacccagttcaagtggatccacattgagggccggaacgcatcggagcaggtgaagatgctgcagcggatagacgcacacaacaccaggcagcctccagagcagaagatccgggtgtccgtggaggtggagaagccacgagaggagctcttccagctgtttggctacggagacgtggtgggtgccccattcagcctctctttgccacttccagctaatttggttcttaaagggagccagaatccttttatcctgcctaccacaattggaatagtggttcctggtttggtggtgtttgaagatgggggatgggggttaaagcaaagaagtagacccctagccttgggctccagtgcaggcctcagcagtgagcaaggagtagaatgtctccaccccaggtgggtgcataggtgtaagaatgcccagagggcttgggtagggcttaaacagccacagggcaagcctgtgtggaagcatctcctctctggggctccccagtcttttcctctgcagaatgagggcacacaactgttctctgaggtttcttccaactcaggggtgtctggcaggttgtgggggctgctagggtgagggaagggtgggaaggagacttgcatgagtctctttttgaaaaggctggatgtaaatggaatttgggaagtaatcccagcatcatagcagaagttggttggagaccatccagccaaggtcctcaaccttgtgacttgtcctcaaccttggctgcatattaaaaaagatgaatgcaggccaagtgtagtggctcacacttgtaatcccagagctttgggaagctgaggtaggaggattgcttgatgccaggagtccaagaccagcctggacaacatagcaagacccctgtctctatgaaaataaattaggccaagagcagtgactcatacctgtaatcccagcaccttgggaggccaatgcaggaggatcacttcagccagtca

SEQ ID NO: 16 - DNA, 1861 bp, Homo sapiens
  source 1..1861: mol_type = genomic DNA
tgactggctgaagtgatcctcctgcattggcctcccaaggtgctgggattacaggtatgagtcactgctcttggcctaatttattttcatagagacaggggtcttgctatgttgtccaggctggtcttggactcctggcatcaagcaatcctcctacctcagcttcccaaagctctgggattacaagtgtgagccactacacttggcctgcattcatcttttttaatatgcagccaaggttgaggacaagtcacaaggttgaggaccttggctggatggtctccaaccaacttctgctatgatgctgggattacttcccaaattccatttacatccagccttttcaaaaagagactcatgcaagtctccttcccacccttccctcaccctagcagcccccacaacctgccagacacccctgagttggaagaaacctcagagaacagttgtgtgccctcattctgcagaggaaaagactggggagccccagagaggagatgcttccacacaggcttgccctgtggctgtttaagccctacccaagccctctgggcattcttacacctatgcacccacctggggtggagacattctactccttgctcactgctgaggcctgcactggagcccaaggctaggggtctacttctttgctttaacccccatcccccatcttcaaacaccaccaaaccaggaaccactattccaattgtggtaggcaggataaaaggattctggctccctttaagaaccaaattagctggaagtggcaaagagaggctgaatggggcacccaccacgtctccgtagccaaacagctggaagagctcctctcgtggcttctccacctccacggacacccggatcttctgctctggaggctgcctggtgttgtgtgcgtctatccgctgcagcatcttcacctgctccgatgcgttccggccctcaatgtggatccacttgaactgggtcagatcaaccttctcaaagtctgtagcagacacatctggcaggctcctgtcatagtataggatggtgcggctaccactggcctcgttgatgatgaccgtggcgatggggacggagcctgtggtctgaaagactgtgtagcgtaggtccacagaatagcggcggaggtcatccaggacaaaatcagcaacatggccaggagccattgagcccatgaaggcacagggggctccgagcagggagagaacggtgcaggagttggacgcgttgcctccgcgctgccatctctgggacaaacaccttatctccgagtcctccttagggtacttgtccaccaggctgatgacgtccagcaccactagccccacgcacaggatctgcttctcttccatgaggctactcccagagcttcctgcccgcccggctgacggggttcctcccggcctctgcctcttatccaggaggatggtgtccccgctcccagctgccctggctcctcctccgcgtgggagctcctcctccagggagccacctgcagcggccaggggtgcagggaacgaaaggagcagggcccttcctcgcgacacccgaagacccgagcgggtctaggaaagccaacccagaggtcttggtccccggtcttcccgtagcaggttgcctgggcctgcagatggcaacgcctcccacttctcagccttagtttcctcgcttgtcagatggactcacagctgatgcaaacctttttaaagcgcggctaagcgatctcgagaatgcaaagagaaaatgcgctacttgccccgcactctcctgcacctgcgtctccgactcccgacccgggacacgcgaggtacagctgggcctcgcatctgcagccctgcctgaagcccgcggt

SEQ ID NO: 17 - DNA, 2387 bp, Homo sapiens
  source 1..2387: mol_type = genomic DNA
aggcagggctgcagatgcgaggcccagctgtacctcgcgtgtcccgggtcgggagtcggagacgcaggtgcaggagagtgcggggcaagtagcgcattttctctttgcattctcgagatcgcttagccgcgctttaaaaaggtttgcatcagctgtgagtccatctgacaagcgaggaaactaaggctgagaagtgggaggcgttgccatctgcaggcccaggcaacctgctacgggaagaccggggaccaagacctctgggttggctttcctagacccgctcgggtcttcgggtgtcgcgaggaagggccctgctcctttcgttccctgcacccctggccgctgcaggtggctccctggaggaggagctcccacgcggaggaggagccagggcagctgggagcggggacaccatcctcctggataagaggcagaggccgggaggaaccccgtcagccgggcgggcaggaagctctgggagtagcctcatggaagagaagcagatcctgtgcgtggggctagtggtgctggacgtcatcagcctggtggacaagtaccctaaggaggactcggagataaggtgtttgtcccagagatggcagcgcggaggcaacgcgtccaactcctgcaccgttctctccctgctcggagccccctgtgccttcatgggctcaatggctcctggccatgttgctgacagttttgtcctggatgacctccgccgctattctgtggacctacgctacacagtctttcagaccacaggctccgtccccatcgccacggtcatcatcaacgaggccagtggtagccgcaccatcctatactatgacaggagcctgccagatgtgtctgctacagactttgagaaggttgatctgacccagttcaagtggatccacattgagggccggaacgcatcggagcaggtgaagatgctgcagcggatagacgcacacaacaccaggcagcctccagagcagaagatccgggtgtccgtggaggtggagaagccacgagaggagctcttccagctgtttggctacggagacgtggtgtttgtcagcaaagatgtggccaagcacttggggttccagtcagcagaggaagccttgaggggcttgtatggtcgtgtgaggaaaggggctgtgcttgtctgtgcctgggctgaggagggcgccgacgccctgggccctgatggcaaattgctccactcggatgctttcccgccaccccgcgtggtggatacactgggagctggagacaccttcaatgcctccgtcatcttcagcctctcccaggggaggagcgtgcaggaagcactgagattcgggtgccaggtggccggcaagaagtgtggcctgcagggctttgatggcatcgtgtgagagcaggtgccggctcctcacacaccatggagactaccattgcggctgcatcgccttctcccctccatccagcctggcgtccaggttgccctgttcaggggacagatgcaagctgtggggaggactctgcctgtgtcctgtgttccccacagggagaggctctggggggatggctgggggatgcagagcctcagagcaaataaatcttcctcagagccagcttctcctctcaatgtctgaactgctctggctgggcattcctgaggctctgactcttcgatcctccctctttgtgtccattccccaaattaacctctccgcccaggcccagaggaggggctgcctgggctagagcagcgagaagtgccctgggcttgccaccagctctgccctggctggggaggacactcggtgccccacacccagtgaacctgccaaagaaaccgtgagagctcttcggggccctgcgttgtgcagactctattcccacagctcagaagctgggagtccacaccgctgagctgaactgacaggccagtggggggcaggggtgcgcctcctctgccctgcccaccagcctgtgatttgatggggtcttcattgtccagaaatacctcctcccgctgactgccccagagcctgaaagtctcacccttggagcccaccttggaattaagggcgtgcctcagccacaaatgtgacccaggatacagagtgttgctgtcctcagggaggtccgatctggaacacatattggaattggggccaactccaatatagggtgggtaaggccttataatgtaaagagcatataatgtaaagggctttagagtgagacagacctggattaaaatctgccatttaattagctgcatatcaccttagggtacagcacttaacgcaatctgcctcaatttcttcatctgtcaaatggaaccaattctgcttggctacagaattattgtgaggataaaatcatatataaaatgcccagcatga

SEQ ID NO: 18 - DNA, 2387 bp, Homo sapiens
  source 1..2387: mol_type = genomic DNA
tcatgctgggcattttatatatgattttatcctcacaataattctgtagccaagcagaattggttccatttgacagatgaagaaattgaggcagattgcgttaagtgctgtaccctaaggtgatatgcagctaattaaatggcagattttaatccaggtctgtctcactctaaagccctttacattatatgctctttacattataaggccttacccaccctatattggagttggccccaattccaatatgtgttccagatcggacctccctgaggacagcaacactctgtatcctgggtcacatttgtggctgaggcacgcccttaattccaaggtgggctccaagggtgagactttcaggctctggggcagtcagcgggaggaggtatttctggacaatgaagaccccatcaaatcacaggctggtgggcagggcagaggaggcgcacccctgccccccactggcctgtcagttcagctcagcggtgtggactcccagcttctgagctgtgggaatagagtctgcacaacgcagggccccgaagagctctcacggtttctttggcaggttcactgggtgtggggcaccgagtgtcctccccagccagggcagagctggtggcaagcccagggcacttctcgctgctctagcccaggcagcccctcctctgggcctgggcggagaggttaatttggggaatggacacaaagagggaggatcgaagagtcagagcctcaggaatgcccagccagagcagttcagacattgagaggagaagctggctctgaggaagatttatttgctctgaggctctgcatcccccagccatccccccagagcctctccctgtggggaacacaggacacaggcagagtcctccccacagcttgcatctgtcccctgaacagggcaacctggacgccaggctggatggaggggagaaggcgatgcagccgcaatggtagtctccatggtgtgtgaggagccggcacctgctctcacacgatgccatcaaagccctgcaggccacacttcttgccggccacctggcacccgaatctcagtgcttcctgcacgctcctcccctgggagaggctgaagatgacggaggcattgaaggtgtctccagctcccagtgtatccaccacgcggggtggcgggaaagcatccgagtggagcaatttgccatcagggcccagggcgtcggcgccctcctcagcccaggcacagacaagcacagcccctttcctcacacgaccatacaagcccctcaaggcttcctctgctgactggaaccccaagtgcttggccacatctttgctgacaaacaccacgtctccgtagccaaacagctggaagagctcctctcgtggcttctccacctccacggacacccggatcttctgctctggaggctgcctggtgttgtgtgcgtctatccgctgcagcatcttcacctgctccgatgcgttccggccctcaatgtggatccacttgaactgggtcagatcaaccttctcaaagtctgtagcagacacatctggcaggctcctgtcatagtataggatggtgcggctaccactggcctcgttgatgatgaccgtggcgatggggacggagcctgtggtctgaaagactgtgtagcgtaggtccacagaatagcggcggaggtcatccaggacaaaactgtcagcaacatggccaggagccattgagcccatgaaggcacagggggctccgagcagggagagaacggtgcaggagttggacgcgttgcctccgcgctgccatctctgggacaaacaccttatctccgagtcctccttagggtacttgtccaccaggctgatgacgtccagcaccactagccccacgcacaggatctgcttctcttccatgaggctactcccagagcttcctgcccgcccggctgacggggttcctcccggcctctgcctcttatccaggaggatggtgtccccgctcccagctgccctggctcctcctccgcgtgggagctcctcctccagggagccacctgcagcggccaggggtgcagggaacgaaaggagcagggcccttcctcgcgacacccgaagacccgagcgggtctaggaaagccaacccagaggtcttggtccccggtcttcccgtagcaggttgcctgggcctgcagatggcaacgcctcccacttctcagccttagtttcctcgcttgtcagatggactcacagctgatgcaaacctttttaaagcgcggctaagcgatctcgagaatgcaaagagaaaatgcgctacttgccccgcactctcctgcacctgcgtctccgactcccgacccgggacacgcgaggtacagctgggcctcgcatctgcagccctgcct

SEQ ID NO: 19 - DNA, 1726 bp, Homo sapiens
  source 1..1726: mol_type = genomic DNA
accgcgggcttcaggcagggctgcagatgcgaggcccagctgtacctcgcgtgtcccgggtcgggagtcggagacgcaggtgcaggagagtgcggggcaagtagcgcattttctctttgcattctcgagatcgcttagccgcgctttaaaaaggtttgcatcagctgtgagtccatctgacaagcgaggaaactaaggctgagaagtgggaggcgttgccatctgcaggcccaggcaacctgctacgggaagaccggggaccaagacctctgggttggctttcctagacccgctcgggtcttcgggtgtcgcgaggaagggccctgctcctttcgttccctgcacccctggccgctgcaggtggctccctggaggaggagctcccacgcggaggaggagccagggcagctgggagcggggacaccatcctcctggataagaggcagaggccgggaggaaccccgtcagccgggcgggcaggaagctctgggagtagcctcatggaagagaagcagatcctgtgcgtggggctagtggtgctggacgtcatcagcctggtggacaagtaccctaaggaggactcggagataaggtgtttgtcccagagatggcagcgcggaggcaacgcgtccaactcctgcaccgttctctccctgctcggagccccctgtgccttcatgggctcaatggctcctggccatgttgctgagagcctgccagatgtgtctgctacagactttgagaaggttgatctgacccagttcaagtggatccacattgagggccggaacgcatcggagcaggtgaagatgctgcagcggatagacgcacacaacaccaggcagcctccagagcagaagatccgggtgtccgtggaggtggagaagccacgagaggagctcttccagctgtttggctacggagacgtggtgggtgccccattcagcctctctttgccacttccagctaatttggttcttaaagggagccagaatccttttatcctgcctaccacaattggaatagtggttcctggtttggtggtgtttgaagatgggggatgggggttaaagcaaagaagtagacccctagccttgggctccagtgcaggcctcagcagtgagcaaggagtagaatgtctccaccccaggtgggtgcataggtgtaagaatgcccagagggcttgggtagggcttaaacagccacagggcaagcctgtgtggaagcatctcctctctggggctccccagtcttttcctctgcagaatgagggcacacaactgttctctgaggtttcttccaactcaggggtgtctggcaggttgtgggggctgctagggtgagggaagggtgggaaggagacttgcatgagtctctttttgaaaaggctggatgtaaatggaatttgggaagtaatcccagcatcatagcagaagttggttggagaccatccagccaaggtcctcaaccttgtgacttgtcctcaaccttggctgcatattaaaaaagatgaatgcaggccaagtgtagtggctcacacttgtaatcccagagctttgggaagctgaggtaggaggattgcttgatgccaggagtccaagaccagcctggacaacatagcaagacccctgtctctatgaaaataaattaggccaagagcagtgactcatacctgtaatcccagcaccttgggaggccaatgcaggaggatcacttcagccagtca

SEQ ID NO: 20 - DNA, 1726 bp, Homo sapiens
  source 1..1726: mol_type = genomic DNA
tgactggctgaagtgatcctcctgcattggcctcccaaggtgctgggattacaggtatgagtcactgctcttggcctaatttattttcatagagacaggggtcttgctatgttgtccaggctggtcttggactcctggcatcaagcaatcctcctacctcagcttcccaaagctctgggattacaagtgtgagccactacacttggcctgcattcatcttttttaatatgcagccaaggttgaggacaagtcacaaggttgaggaccttggctggatggtctccaaccaacttctgctatgatgctgggattacttcccaaattccatttacatccagccttttcaaaaagagactcatgcaagtctccttcccacccttccctcaccctagcagcccccacaacctgccagacacccctgagttggaagaaacctcagagaacagttgtgtgccctcattctgcagaggaaaagactggggagccccagagaggagatgcttccacacaggcttgccctgtggctgtttaagccctacccaagccctctgggcattcttacacctatgcacccacctggggtggagacattctactccttgctcactgctgaggcctgcactggagcccaaggctaggggtctacttctttgctttaacccccatcccccatcttcaaacaccaccaaaccaggaaccactattccaattgtggtaggcaggataaaaggattctggctccctttaagaaccaaattagctggaagtggcaaagagaggctgaatggggcacccaccacgtctccgtagccaaacagctggaagagctcctctcgtggcttctccacctccacggacacccggatcttctgctctggaggctgcctggtgttgtgtgcgtctatccgctgcagcatcttcacctgctccgatgcgttccggccctcaatgtggatccacttgaactgggtcagatcaaccttctcaaagtctgtagcagacacatctggcaggctctcagcaacatggccaggagccattgagcccatgaaggcacagggggctccgagcagggagagaacggtgcaggagttggacgcgttgcctccgcgctgccatctctgggacaaacaccttatctccgagtcctccttagggtacttgtccaccaggctgatgacgtccagcaccactagccccacgcacaggatctgcttctcttccatgaggctactcccagagcttcctgcccgcccggctgacggggttcctcccggcctctgcctcttatccaggaggatggtgtccccgctcccagctgccctggctcctcctccgcgtgggagctcctcctccagggagccacctgcagcggccaggggtgcagggaacgaaaggagcagggcccttcctcgcgacacccgaagacccgagcgggtctaggaaagccaacccagaggtcttggtccccggtcttcccgtagcaggttgcctgggcctgcagatggcaacgcctcccacttctcagccttagtttcctcgcttgtcagatggactcacagctgatgcaaacctttttaaagcgcggctaagcgatctcgagaatgcaaagagaaaatgcgctacttgccccgcactctcctgcacctgcgtctccgactcccgacccgggacacgcgaggtacagctgggcctcgcatctgcagccctgcctgaagcccgcggt

SEQ ID NO: 21 - DNA, 1609 bp, Homo sapiens
  source 1..1609: mol_type = genomic DNA
accgcgggcttcaggcagggctgcagatgcgaggcccagctgtacctcgcgtgtcccgggtcgggagtcggagacgcaggtgcaggagagtgcggggcaagtagcgcattttctctttgcattctcgagatcgcttagccgcgctttaaaaaggtttgcatcagctgtgagtccatctgacaagcgaggaaactaaggctgagaagtgggaggcgttgccatctgcaggcccaggcaacctgctacgggaagaccggggaccaagacctctgggttggctttcctagacccgctcgggtcttcgggtgtcgcgaggaagggccctgctcctttcgttccctgcacccctggccgctgcaggtggctccctggaggaggagctcccacgcggaggaggagccagggcagctgggagcggggacaccatcctcctggataagaggcagaggccgggaggaaccccgtcagccgggcgggcaggaagctctgggagtagcctcatggaagagaagcagatcctgtgcgtggggctagtggtgctggacgtcatcagcctggtggacaagtaccctaaggaggactcggagataaggagcctgccagatgtgtctgctacagactttgagaaggttgatctgacccagttcaagtggatccacattgagggccggaacgcatcggagcaggtgaagatgctgcagcggatagacgcacacaacaccaggcagcctccagagcagaagatccgggtgtccgtggaggtggagaagccacgagaggagctcttccagctgtttggctacggagacgtggtgggtgccccattcagcctctctttgccacttccagctaatttggttcttaaagggagccagaatccttttatcctgcctaccacaattggaatagtggttcctggtttggtggtgtttgaagatgggggatgggggttaaagcaaagaagtagacccctagccttgggctccagtgcaggcctcagcagtgagcaaggagtagaatgtctccaccccaggtgggtgcataggtgtaagaatgcccagagggcttgggtagggcttaaacagccacagggcaagcctgtgtggaagcatctcctctctggggctccccagtcttttcctctgcagaatgagggcacacaactgttctctgaggtttcttccaactcaggggtgtctggcaggttgtgggggctgctagggtgagggaagggtgggaaggagacttgcatgagtctctttttgaaaaggctggatgtaaatggaatttgggaagtaatcccagcatcatagcagaagttggttggagaccatccagccaaggtcctcaaccttgtgacttgtcctcaaccttggctgcatattaaaaaagatgaatgcaggccaagtgtagtggctcacacttgtaatcccagagctttgggaagctgaggtaggaggattgcttgatgccaggagtccaagaccagcctggacaacatagcaagacccctgtctctatgaaaataaattaggccaagagcagtgactcatacctgtaatcccagcaccttgggaggccaatgcaggaggatcacttcagccagtca

SEQ ID NO: 22 - DNA, 1609 bp, Homo sapiens
  source 1..1609: mol_type = genomic DNA
tgactggctgaagtgatcctcctgcattggcctcccaaggtgctgggattacaggtatgagtcactgctcttggcctaatttattttcatagagacaggggtcttgctatgttgtccaggctggtcttggactcctggcatcaagcaatcctcctacctcagcttcccaaagctctgggattacaagtgtgagccactacacttggcctgcattcatcttttttaatatgcagccaaggttgaggacaagtcacaaggttgaggaccttggctggatggtctccaaccaacttctgctatgatgctgggattacttcccaaattccatttacatccagccttttcaaaaagagactcatgcaagtctccttcccacccttccctcaccctagcagcccccacaacctgccagacacccctgagttggaagaaacctcagagaacagttgtgtgccctcattctgcagaggaaaagactggggagccccagagaggagatgcttccacacaggcttgccctgtggctgtttaagccctacccaagccctctgggcattcttacacctatgcacccacctggggtggagacattctactccttgctcactgctgaggcctgcactggagcccaaggctaggggtctacttctttgctttaacccccatcccccatcttcaaacaccaccaaaccaggaaccactattccaattgtggtaggcaggataaaaggattctggctccctttaagaaccaaattagctggaagtggcaaagagaggctgaatggggcacccaccacgtctccgtagccaaacagctggaagagctcctctcgtggcttctccacctccacggacacccggatcttctgctctggaggctgcctggtgttgtgtgcgtctatccgctgcagcatcttcacctgctccgatgcgttccggccctcaatgtggatccacttgaactgggtcagatcaaccttctcaaagtctgtagcagacacatctggcaggctccttatctccgagtcctccttagggtacttgtccaccaggctgatgacgtccagcaccactagccccacgcacaggatctgcttctcttccatgaggctactcccagagcttcctgcccgcccggctgacggggttcctcccggcctctgcctcttatccaggaggatggtgtccccgctcccagctgccctggctcctcctccgcgtgggagctcctcctccagggagccacctgcagcggccaggggtgcagggaacgaaaggagcagggcccttcctcgcgacacccgaagacccgagcgggtctaggaaagccaacccagaggtcttggtccccggtcttcccgtagcaggttgcctgggcctgcagatggcaacgcctcccacttctcagccttagtttcctcgcttgtcagatggactcacagctgatgcaaacctttttaaagcgcggctaagcgatctcgagaatgcaaagagaaaatgcgctacttgccccgcactctcctgcacctgcgtctccgactcccgacccgggacacgcgaggtacagctgggcctcgcatctgcagccctgcctgaagcccgcggt

SEQ ID NO: 23 - DNA, 2144 bp, Homo sapiens
  source 1..2144: mol_type = genomic DNA
accgcgggcttcaggcagggctgcagatgcgaggcccagctgtacctcgcgtgtcccgggtcgggagtcggagacgcaggtgcaggagagtgcggggcaagtagcgcattttctctttgcattctcgagatcgcttagccgcgctttaaaaaggtttgcatcagctgtgagtccatctgacaagcgaggaaactaaggctgagaagtgggaggcgttgccatctgcaggcccaggcaacctgctacgggaagaccggggaccaagacctctgggttggctttcctagacccgctcgggtcttcgggtgtcgcgaggaagggccctgctcctttcgttccctgcacccctggccgctgcaggtggctccctggaggaggagctcccacgcggaggaggagccagggcagctgggagcggggacaccatcctcctggataagaggcagaggccgggaggaaccccgtcagccgggcgggcaggaagctctgggagtagcctcatggaagagaagcagatcctgtgcgtggggctagtggtgctggacgtcatcagcctggtggacaagtaccctaaggaggactcggagataaggagcctgccagatgtgtctgctacagactttgagaaggttgatctgacccagttcaagtggatccacattgagggccggaacgcatcggagcaggtgaagatgctgcagcggatagacgcacacaacaccaggcagcctccagagcagaagatccgggtgtccgtggaggtggagaagccacgagaggagctcttccagctgtttggctacggagacgtggtgtttgtcagcaaagatgtggccaagcacttggggttccagtcagcagaggaagccttgaggggcttgtatggtcgtgtgaggaaaggggctgtgcttgtctgtgcctgggctgaggagggcgccgacgccctgggccctgatggcaaattgctccactcggatgctttcccgccaccccgcgtggtggatacactgggagctggagacaccttcaatgcctccgtcatcttcagcctctcccaggggaggagcgtgcaggaagcactgagattcgggtgccaggtggccggcaagaagtgtggcctgcagggctttgatggcatcgtgtgagagcaggtgccggctcctcacacaccatggagactaccattgcggctgcatcgccttctcccctccatccagcctggcgtccaggttgccctgttcaggggacagatgcaagctgtggggaggactctgcctgtgtcctgtgttccccacagggagaggctctggggggatggctgggggatgcagagcctcagagcaaataaatcttcctcagagccagcttctcctctcaatgtctgaactgctctggctgggcattcctgaggctctgactcttcgatcctccctctttgtgtccattccccaaattaacctctccgcccaggcccagaggaggggctgcctgggctagagcagcgagaagtgccctgggcttgccaccagctctgccctggctggggaggacactcggtgccccacacccagtgaacctgccaaagaaaccgtgagagctcttcggggccctgcgttgtgcagactctattcccacagctcagaagctgggagtccacaccgctgagctgaactgacaggccagtggggggcaggggtgcgcctcctctgccctgcccaccagcctgtgatttgatggggtcttcattgtccagaaatacctcctcccgctgactgccccagagcctgaaagtctcacccttggagcccaccttggaattaagggcgtgcctcagccacaaatgtgacccaggatacagagtgttgctgtcctcagggaggtccgatctggaacacatattggaattggggccaactccaatatagggtgggtaaggccttataatgtaaagagcatataatgtaaagggctttagagtgagacagacctggattaaaatctgccatttaattagctgcatatcaccttagggtacagcacttaacgcaatctgcctcaatttcttcatctgtcaaatggaaccaattctgcttggctacagaattattgtgaggataaaatcatatataaaatgcccagcatga

SEQ ID NO: 24 - DNA, 2144 bp, Homo sapiens
  source 1..2144: mol_type = genomic DNA
tcatgctgggcattttatatatgattttatcctcacaataattctgtagccaagcagaattggttccatttgacagatgaagaaattgaggcagattgcgttaagtgctgtaccctaaggtgatatgcagctaattaaatggcagattttaatccaggtctgtctcactctaaagccctttacattatatgctctttacattataaggccttacccaccctatattggagttggccccaattccaatatgtgttccagatcggacctccctgaggacagcaacactctgtatcctgggtcacatttgtggctgaggcacgcccttaattccaaggtgggctccaagggtgagactttcaggctctggggcagtcagcgggaggaggtatttctggacaatgaagaccccatcaaatcacaggctggtgggcagggcagaggaggcgcacccctgccccccactggcctgtcagttcagctcagcggtgtggactcccagcttctgagctgtgggaatagagtctgcacaacgcagggccccgaagagctctcacggtttctttggcaggttcactgggtgtggggcaccgagtgtcctccccagccagggcagagctggtggcaagcccagggcacttctcgctgctctagcccaggcagcccctcctctgggcctgggcggagaggttaatttggggaatggacacaaagagggaggatcgaagagtcagagcctcaggaatgcccagccagagcagttcagacattgagaggagaagctggctctgaggaagatttatttgctctgaggctctgcatcccccagccatccccccagagcctctccctgtggggaacacaggacacaggcagagtcctccccacagcttgcatctgtcccctgaacagggcaacctggacgccaggctggatggaggggagaaggcgatgcagccgcaatggtagtctccatggtgtgtgaggagccggcacctgctctcacacgatgccatcaaagccctgcaggccacacttcttgccggccacctggcacccgaatctcagtgcttcctgcacgctcctcccctgggagaggctgaagatgacggaggcattgaaggtgtctccagctcccagtgtatccaccacgcggggtggcgggaaagcatccgagtggagcaatttgccatcagggcccagggcgtcggcgccctcctcagcccaggcacagacaagcacagcccctttcctcacacgaccatacaagcccctcaaggcttcctctgctgactggaaccccaagtgcttggccacatctttgctgacaaacaccacgtctccgtagccaaacagctggaagagctcctctcgtggcttctccacctccacggacacccggatcttctgctctggaggctgcctggtgttgtgtgcgtctatccgctgcagcatcttcacctgctccgatgcgttccggccctcaatgtggatccacttgaactgggtcagatcaaccttctcaaagtctgtagcagacacatctggcaggctccttatctccgagtcctccttagggtacttgtccaccaggctgatgacgtccagcaccactagccccacgcacaggatctgcttctcttccatgaggctactcccagagcttcctgcccgcccggctgacggggttcctcccggcctctgcctcttatccaggaggatggtgtccccgctcccagctgccctggctcctcctccgcgtgggagctcctcctccagggagccacctgcagcggccaggggtgcagggaacgaaaggagcagggcccttcctcgcgacacccgaagacccgagcgggtctaggaaagccaacccagaggtcttggtccccggtcttcccgtagcaggttgcctgggcctgcagatggcaacgcctcccacttctcagccttagtttcctcgcttgtcagatggactcacagctgatgcaaacctttttaaagcgcggctaagcgatctcgagaatgcaaagagaaaatgcgctacttgccccgcactctcctgcacctgcgtctccgactcccgacccgggacacgcgaggtacagctgggcctcgcatctgcagccctgcctgaagcccgcggt

SEQ ID NO: 25 - DNA, 2397 bp, Homo sapiens
  source 1..2397: mol_type = genomic DNA
aggcagggctgcagatgcgaggcccagctgtacctcgcgtgtcccgggtcgggagtcggagacgcaggtgcaggagagtgcggggcaagtagcgcattttctctttgcattctcgagatcgcttagccgcgctttaaaaaggtttgcatcagctgtgagtccatctgacaagcgaggaaactaaggctgagaagtgggaggcgttgccatctgcaggcccaggcaacctgctacgggaagaccggggaccaagacctctgggttggctttcctagacccgctcgggtcttcgggtgtcgcgaggaagggccctgctcctttcgttccctgcacccctggccgctgcaggtggctccctggaggaggagctcccacgcggaggaggagccagggcagctgggagcggggacaccatcctcctggataagaggcagaggccgggaggaaccccgtcagccgggcgggcaggaagctctgggagtagcctcatggaagagaagcagatcctgtgcgtggggctagtggtgctggacgtcatcagcctggtggacaagtaccctaaggaggactcggagataaggtgtttgtcccagagatggcagcgcggaggcaacgcgtccaactcctgcaccgttctctccctgctcggagccccctgtgccttcatgggctcaatggctcctggccatgttgctgacttcctggtggccgacttcaggcggcggggcgtggacgtgtctcaggtggcctggcagagcaagggggacacccccagctcctgctgcatcatcaacaactccaatggcaaccgtaccattgtgctccatgacacgagcctgccagatgtgtctgctacagactttgagaaggttgatctgacccagttcaagtggatccacattgagggccggaacgcatcggagcaggtgaagatgctgcagcggatagacgcacacaacaccaggcagcctccagagcagaagatccgggtgtccgtggaggtggagaagccacgagaggagctcttccagctgtttggctacggagacgtggtgtttgtcagcaaagatgtggccaagcacttggggttccagtcagcagaggaagccttgaggggcttgtatggtcgtgtgaggaaaggggctgtgcttgtctgtgcctgggctgaggagggcgccgacgccctgggccctgatggcaaattgctccactcggatgctttcccgccaccccgcgtggtggatacactgggagctggagacaccttcaatgcctccgtcatcttcagcctctcccaggggaggagcgtgcaggaagcactgagattcgggtgccaggtggccggcaagaagtgtggcctgcagggctttgatggcatcgtgtgagagcaggtgccggctcctcacacaccatggagactaccattgcggctgcatcgccttctcccctccatccagcctggcgtccaggttgccctgttcaggggacagatgcaagctgtggggaggactctgcctgtgtcctgtgttccccacagggagaggctctggggggatggctgggggatgcagagcctcagagcaaataaatcttcctcagagccagcttctcctctcaatgtctgaactgctctggctgggcattcctgaggctctgactcttcgatcctccctctttgtgtccattccccaaattaacctctccgcccaggcccagaggaggggctgcctgggctagagcagcgagaagtgccctgggcttgccaccagctctgccctggctggggaggacactcggtgccccacacccagtgaacctgccaaagaaaccgtgagagctcttcggggccctgcgttgtgcagactctattcccacagctcagaagctgggagtccacaccgctgagctgaactgacaggccagtggggggcaggggtgcgcctcctctgccctgcccaccagcctgtgatttgatggggtcttcattgtccagaaatacctcctcccgctgactgccccagagcctgaaagtctcacccttggagcccaccttggaattaagggcgtgcctcagccacaaatgtgacccaggatacagagtgttgctgtcctcagggaggtccgatctggaacacatattggaattggggccaactccaatatagggtgggtaaggccttataatgtaaagagcatataatgtaaagggctttagagtgagacagacctggattaaaatctgccatttaattagctgcatatcaccttagggtacagcacttaacgcaatctgcctcaatttcttcatctgtcaaatggaaccaattctgcttggctacagaattattgtgaggataaaatcatatataaaatgcccagcatgatgcctgatgtgta

SEQ ID NO: 26 - DNA, 2397 bp, Homo sapiens
  source 1..2397: mol_type = genomic DNA
tacacatcaggcatcatgctgggcattttatatatgattttatcctcacaataattctgtagccaagcagaattggttccatttgacagatgaagaaattgaggcagattgcgttaagtgctgtaccctaaggtgatatgcagctaattaaatggcagattttaatccaggtctgtctcactctaaagccctttacattatatgctctttacattataaggccttacccaccctatattggagttggccccaattccaatatgtgttccagatcggacctccctgaggacagcaacactctgtatcctgggtcacatttgtggctgaggcacgcccttaattccaaggtgggctccaagggtgagactttcaggctctggggcagtcagcgggaggaggtatttctggacaatgaagaccccatcaaatcacaggctggtgggcagggcagaggaggcgcacccctgccccccactggcctgtcagttcagctcagcggtgtggactcccagcttctgagctgtgggaatagagtctgcacaacgcagggccccgaagagctctcacggtttctttggcaggttcactgggtgtggggcaccgagtgtcctccccagccagggcagagctggtggcaagcccagggcacttctcgctgctctagcccaggcagcccctcctctgggcctgggcggagaggttaatttggggaatggacacaaagagggaggatcgaagagtcagagcctcaggaatgcccagccagagcagttcagacattgagaggagaagctggctctgaggaagatttatttgctctgaggctctgcatcccccagccatccccccagagcctctccctgtggggaacacaggacacaggcagagtcctccccacagcttgcatctgtcccctgaacagggcaacctggacgccaggctggatggaggggagaaggcgatgcagccgcaatggtagtctccatggtgtgtgaggagccggcacctgctctcacacgatgccatcaaagccctgcaggccacacttcttgccggccacctggcacccgaatctcagtgcttcctgcacgctcctcccctgggagaggctgaagatgacggaggcattgaaggtgtctccagctcccagtgtatccaccacgcggggtggcgggaaagcatccgagtggagcaatttgccatcagggcccagggcgtcggcgccctcctcagcccaggcacagacaagcacagcccctttcctcacacgaccatacaagcccctcaaggcttcctctgctgactggaaccccaagtgcttggccacatctttgctgacaaacaccacgtctccgtagccaaacagctggaagagctcctctcgtggcttctccacctccacggacacccggatcttctgctctggaggctgcctggtgttgtgtgcgtctatccgctgcagcatcttcacctgctccgatgcgttccggccctcaatgtggatccacttgaactgggtcagatcaaccttctcaaagtctgtagcagacacatctggcaggctcgtgtcatggagcacaatggtacggttgccattggagttgttgatgatgcagcaggagctgggggtgtcccccttgctctgccaggccacctgagacacgtccacgccccgccgcctgaagtcggccaccaggaagtcagcaacatggccaggagccattgagcccatgaaggcacagggggctccgagcagggagagaacggtgcaggagttggacgcgttgcctccgcgctgccatctctgggacaaacaccttatctccgagtcctccttagggtacttgtccaccaggctgatgacgtccagcaccactagccccacgcacaggatctgcttctcttccatgaggctactcccagagcttcctgcccgcccggctgacggggttcctcccggcctctgcctcttatccaggaggatggtgtccccgctcccagctgccctggctcctcctccgcgtgggagctcctcctccagggagccacctgcagcggccaggggtgcagggaacgaaaggagcagggcccttcctcgcgacacccgaagacccgagcgggtctaggaaagccaacccagaggtcttggtccccggtcttcccgtagcaggttgcctgggcctgcagatggcaacgcctcccacttctcagccttagtttcctcgcttgtcagatggactcacagctgatgcaaacctttttaaagcgcggctaagcgatctcgagaatgcaaagagaaaatgcgctacttgccccgcactctcctgcacctgcgtctccgactcccgacccgggacacgcgaggtacagctgggcctcgcatctgcagccctgcct

SEQ ID NO: 27 - DNA, 2397 bp, Homo sapiens
  source 1..2397: mol_type = genomic DNA
aggcagggctgcagatgcgaggcccagctgtacctcgcgtgtcccgggtcgggagtcggagacgcaggtgcaggagagtgcggggcaagtagcgcattttctctttgcattctcgagatcgcttagccgcgctttaaaaaggtttgcatcagctgtgagtccatctgacaagcgaggaaactaaggctgagaagtgggaggcgttgccatctgcaggcccaggcaacctgctacgggaagaccggggaccaagacctctgggttggctttcctagacccgctcgggtcttcgggtgtcgcgaggaagggccctgctcctttcgttccctgcacccctggccgctgcaggtggctccctggaggaggagctcccacgcggaggaggagccagggcagctgggagcggggacaccatcctcctggataagaggcagaggccgggaggaaccccgtcagccgggcgggcaggaagctctgggagtagcctcatggaagagaagcagatcctgtgcgtggggctagtggtgctggacgtcatcagcctggtggacaagtaccctaaggaggactcggagataaggtgtttgtcccagagatggcagcgcggaggcaacgcgtccaactcctgcaccgttctctccctgctcggagccccctgtgccttcatgggctcaatggctcctggccatgttgctgattttgtcctggatgacctccgccgctattctgtggacctacgctacacagtctttcagaccacaggctccgtccccatcgccacggtcatcatcaacgaggccagtggtagccgcaccatcctatactatgacaggagcctgccagatgtgtctgctacagactttgagaaggttgatctgacccagttcaagtggatccacattgagggccggaacgcatcggagcaggtgaagatgctgcagcggatagacgcacacaacaccaggcagcctccagagcagaagatccgggtgtccgtggaggtggagaagccacgagaggagctcttccagctgtttggctacggagacgtggtgtttgtcagcaaagatgtggccaagcacttggggttccagtcagcagaggaagccttgaggggcttgtatggtcgtgtgaggaaaggggctgtgcttgtctgtgcctgggctgaggagggcgccgacgccctgggccctgatggcaaattgctccactcggatgctttcccgccaccccgcgtggtggatacactgggagctggagacaccttcaatgcctccgtcatcttcagcctctcccaggggaggagcgtgcaggaagcactgagattcgggtgccaggtggccggcaagaagtgtggcctgcagggctttgatggcatcgtgtgagagcaggtgccggctcctcacacaccatggagactaccattgcggctgcatcgccttctcccctccatccagcctggcgtccaggttgccctgttcaggggacagatgcaagctgtggggaggactctgcctgtgtcctgtgttccccacagggagaggctctggggggatggctgggggatgcagagcctcagagcaaataaatcttcctcagagccagcttctcctctcaatgtctgaactgctctggctgggcattcctgaggctctgactcttcgatcctccctctttgtgtccattccccaaattaacctctccgcccaggcccagaggaggggctgcctgggctagagcagcgagaagtgccctgggcttgccaccagctctgccctggctggggaggacactcggtgccccacacccagtgaacctgccaaagaaaccgtgagagctcttcggggccctgcgttgtgcagactctattcccacagctcagaagctgggagtccacaccgctgagctgaactgacaggccagtggggggcaggggtgcgcctcctctgccctgcccaccagcctgtgatttgatggggtcttcattgtccagaaatacctcctcccgctgactgccccagagcctgaaagtctcacccttggagcccaccttggaattaagggcgtgcctcagccacaaatgtgacccaggatacagagtgttgctgtcctcagggaggtccgatctggaacacatattggaattggggccaactccaatatagggtgggtaaggccttataatgtaaagagcatataatgtaaagggctttagagtgagacagacctggattaaaatctgccatttaattagctgcatatcaccttagggtacagcacttaacgcaatctgcctcaatttcttcatctgtcaaatggaaccaattctgcttggctacagaattattgtgaggataaaatcatatataaaatgcccagcatgatgcctgatgtgta

SEQ ID NO: 28 - DNA, 2397 bp, Homo sapiens
  source 1..2397: mol_type = genomic DNA
tacacatcaggcatcatgctgggcattttatatatgattttatcctcacaataattctgtagccaagcagaattggttccatttgacagatgaagaaattgaggcagattgcgttaagtgctgtaccctaaggtgatatgcagctaattaaatggcagattttaatccaggtctgtctcactctaaagccctttacattatatgctctttacattataaggccttacccaccctatattggagttggccccaattccaatatgtgttccagatcggacctccctgaggacagcaacactctgtatcctgggtcacatttgtggctgaggcacgcccttaattccaaggtgggctccaagggtgagactttcaggctctggggcagtcagcgggaggaggtatttctggacaatgaagaccccatcaaatcacaggctggtgggcagggcagaggaggcgcacccctgccccccactggcctgtcagttcagctcagcggtgtggactcccagcttctgagctgtgggaatagagtctgcacaacgcagggccccgaagagctctcacggtttctttggcaggttcactgggtgtggggcaccgagtgtcctccccagccagggcagagctggtggcaagcccagggcacttctcgctgctctagcccaggcagcccctcctctgggcctgggcggagaggttaatttggggaatggacacaaagagggaggatcgaagagtcagagcctcaggaatgcccagccagagcagttcagacattgagaggagaagctggctctgaggaagatttatttgctctgaggctctgcatcccccagccatccccccagagcctctccctgtggggaacacaggacacaggcagagtcctccccacagcttgcatctgtcccctgaacagggcaacctggacgccaggctggatggaggggagaaggcgatgcagccgcaatggtagtctccatggtgtgtgaggagccggcacctgctctcacacgatgccatcaaagccctgcaggccacacttcttgccggccacctggcacccgaatctcagtgcttcctgcacgctcctcccctgggagaggctgaagatgacggaggcattgaaggtgtctccagctcccagtgtatccaccacgcggggtggcgggaaagcatccgagtggagcaatttgccatcagggcccagggcgtcggcgccctcctcagcccaggcacagacaagcacagcccctttcctcacacgaccatacaagcccctcaaggcttcctctgctgactggaaccccaagtgcttggccacatctttgctgacaaacaccacgtctccgtagccaaacagctggaagagctcctctcgtggcttctccacctccacggacacccggatcttctgctctggaggctgcctggtgttgtgtgcgtctatccgctgcagcatcttcacctgctccgatgcgttccggccctcaatgtggatccacttgaactgggtcagatcaaccttctcaaagtctgtagcagacacatctggcaggctcctgtcatagtataggatggtgcggctaccactggcctcgttgatgatgaccgtggcgatggggacggagcctgtggtctgaaagactgtgtagcgtaggtccacagaatagcggcggaggtcatccaggacaaaatcagcaacatggccaggagccattgagcccatgaaggcacagggggctccgagcagggagagaacggtgcaggagttggacgcgttgcctccgcgctgccatctctgggacaaacaccttatctccgagtcctccttagggtacttgtccaccaggctgatgacgtccagcaccactagccccacgcacaggatctgcttctcttccatgaggctactcccagagcttcctgcccgcccggctgacggggttcctcccggcctctgcctcttatccaggaggatggtgtccccgctcccagctgccctggctcctcctccgcgtgggagctcctcctccagggagccacctgcagcggccaggggtgcagggaacgaaaggagcagggcccttcctcgcgacacccgaagacccgagcgggtctaggaaagccaacccagaggtcttggtccccggtcttcccgtagcaggttgcctgggcctgcagatggcaacgcctcccacttctcagccttagtttcctcgcttgtcagatggactcacagctgatgcaaacctttttaaagcgcggctaagcgatctcgagaatgcaaagagaaaatgcgctacttgccccgcactctcctgcacctgcgtctccgactcccgacccgggacacgcgaggtacagctgggcctcgcatctgcagccctgcct

SEQ ID NO: 29 - DNA, 1590 bp, Mus musculus
  source 1..1590: mol_type = genomic DNA
gagggagagaacgcttgcttctgtgctccgcctgcgaaggcgaagtttctgttgccagactgtgctagtccgggtggtccagggtctgcagcaggcgcagagggatcggaaaggcgatgcattactagtgcgctttcgctttgacagctgaggcggaaaagtgagagggcctgccattggccgggctaggtaacccacccttgcaaagcagaaagctccctgcgggaggagttctgcacgcagaggaggagccaaggtagccagtgagaagttgggacacggtcctccagtagataagaggcagagcccagcaggaaccccctctgcttgcgggtaggaagcttggggagcagcctcatggaagagaagcagatcctgtgcgtggggctggtggtgctggacatcatcaatgtggtggacaaatacccagaggaagacacggatcgcaggtgcctgtcccagagatggcagcgtggaggcaacgcatccaactcctgcactgtcctttccttgcttggagcccgctgtgccttcatgggctctttggcccctggccacgttgccgattttgtcctggatgacctccgccaacattctgtggacttacgatatgtggtccttcagaccgagggctccatccccacttctacagtcatcatcaacgaggccagcggcagccgcaccattctgcacgcctacagcttcctggtggctgacttcaggcagaggggcgtggatgtgtctcaagtgacttggcagagccagggagataccccttgctcttgctgcatcgtcaacaactccaatggctcccgtaccattatactctacgacacgaacctgccagatgtgtctgctaaggactttgagaaggtcgatctgacccggttcaagtggatccacattgagggccggaatgcatcggaacaggtgaagatgctgcagcggatagaggagcacaatgccaagcagcctctgccacagaaggtccgggtgtcggtggagatagagaagccccgtgaggagctcttccagttgtttagctatggtgaggtggtgtttgtcagcaaagatgtggccaagcacctggggttccagtcagcagtggaggccctgaggggcttgtacagtcgagtgaagaaaggggctacgcttgtctgtgcctgggctgaggagggtgccgatgccctgggccccgatggtcagctgctccactcagatgccttcccaccgccccgagtagtagacactcttggggctggagacaccttcaatgcctctgtcatcttcagcctctcgaagggaaacagcatgcaagaggccctgagattcgggtgccaggtggctggcaagaagtgtggcttgcaggggtttgatggcattgtgtgagaggcaagcggcaccagctcgatacctcagaggctggcaccatgcctgccactgccttctctacttcctccagcttagcatccagctgccattccccggcaggtgtgggatgtgggacagcctctgtctgtgtctgcgtctctgtatacctatctcctctctgcagatacctggagcaaataaatcttcccctgagccagc

SEQ ID NO: 30 - DNA, 1590 bp, Mus musculus
  source 1..1590: mol_type = genomic DNA
gctggctcaggggaagatttatttgctccaggtatctgcagagaggagataggtatacagagacgcagacacagacagaggctgtcccacatcccacacctgccggggaatggcagctggatgctaagctggaggaagtagagaaggcagtggcaggcatggtgccagcctctgaggtatcgagctggtgccgcttgcctctcacacaatgccatcaaacccctgcaagccacacttcttgccagccacctggcacccgaatctcagggcctcttgcatgctgtttcccttcgagaggctgaagatgacagaggcattgaaggtgtctccagccccaagagtgtctactactcggggcggtgggaaggcatctgagtggagcagctgaccatcggggcccagggcatcggcaccctcctcagcccaggcacagacaagcgtagcccctttcttcactcgactgtacaagcccctcagggcctccactgctgactggaaccccaggtgcttggccacatctttgctgacaaacaccacctcaccatagctaaacaactggaagagctcctcacggggcttctctatctccaccgacacccggaccttctgtggcagaggctgcttggcattgtgctcctctatccgctgcagcatcttcacctgttccgatgcattccggccctcaatgtggatccacttgaaccgggtcagatcgaccttctcaaagtccttagcagacacatctggcaggttcgtgtcgtagagtataatggtacgggagccattggagttgttgacgatgcagcaagagcaaggggtatctccctggctctgccaagtcacttgagacacatccacgcccctctgcctgaagtcagccaccaggaagctgtaggcgtgcagaatggtgcggctgccgctggcctcgttgatgatgactgtagaagtggggatggagccctcggtctgaaggaccacatatcgtaagtccacagaatgttggcggaggtcatccaggacaaaatcggcaacgtggccaggggccaaagagcccatgaaggcacagcgggctccaagcaaggaaaggacagtgcaggagttggatgcgttgcctccacgctgccatctctgggacaggcacctgcgatccgtgtcttcctctgggtatttgtccaccacattgatgatgtccagcaccaccagccccacgcacaggatctgcttctcttccatgaggctgctccccaagcttcctacccgcaagcagagggggttcctgctgggctctgcctcttatctactggaggaccgtgtcccaacttctcactggctaccttggctcctcctctgcgtgcagaactcctcccgcagggagctttctgctttgcaagggtgggttacctagcccggccaatggcaggccctctcacttttccgcctcagctgtcaaagcgaaagcgcactagtaatgcatcgcctttccgatccctctgcgcctgctgcagaccctggaccacccggactagcacagtctggcaacagaaacttcgccttcgcaggcggagcacagaagcaagcgttctctccctc

SEQ ID NO: 31 - DNA, 1307 bp, Rattus norvegicus
  source 1..1307: mol_type = genomic DNA
gtgagagggtctgccattggccggactaggtaaccaaaccctcgcaacagcagaaagcaccctgcgggaggagctccgcaggcagaggaggagccagggtagcccctgagaagttgggacacggtcctgcggtagataagagacagagtctagcaggaatcccctccgcttgcgggtaggaagcttggggagcagcctcatggaagagaagcagatcctgtgcgtggggctggtggtgctggacatcatcaatgtggtggacaaatacccagaggaagacacggatcgcaggtgcctatcccagagatggcagcgtggaggcaacgcgtccaactcctgcactgtgctttccttgctcggagcccgctgtgccttcatgggctcgctggcccatggccatgttgccgacttcctggtggccgacttcaggcggaggggtgtggatgtgtctcaagtggcctggcagagccagggagataccccttgctcctgctgcatcgtcaacaactccaatggctcccgtaccattattctctacgacacgaacctgccagatgtgtctgctaaggactttgagaaggtcgatctgacccggttcaagtggatccacattgagggccggaatgcatcggaacaggtaaagatgctacagcggatagaacagtacaatgccacgcagcctctgcagcagaaggtccgggtgtccgtggagatagagaagccccgagaggaactcttccagctgttcggctatggagaggtggtgtttgtcagcaaagatgtggccaagcacctggggttccggtcagcaggggaggccctgaagggcttgtacagtcgtgtgaagaaaggggctacgctcatctgtgcctgggctgaggagggagccgatgccctgggccccgacggccagctgctccactcagatgccttcccaccaccccgagtagtagacactctcggggctggagacaccttcaatgcctctgtcatcttcagcctctccaagggaaacagcatgcaggaggccctgagattcgggtgccaggtggctggcaagaagtgtggcttgcaggggtttgatggcattgtgtgagagatgagcggtgggaggtagcagctcgacacctcagaggctggcaccactgcctgccattgccttcttcatttcatccagcctggcgtctggctgcccagttccctgggccagtgtaggctgtggaacgggtctttctgtctcttctctgcagacacctggagcaaataaatcttcccctgagccaaaaaaaaaaaaaaaaaaaaaaaaa

SEQ ID NO: 32 - DNA, 1307 bp, Rattus norvegicus
  source 1..1307: mol_type = genomic DNA
tttttttttttttttttttttttttggctcaggggaagatttatttgctccaggtgtctgcagagaagagacagaaagacccgttccacagcctacactggcccagggaactgggcagccagacgccaggctggatgaaatgaagaaggcaatggcaggcagtggtgccagcctctgaggtgtcgagctgctacctcccaccgctcatctctcacacaatgccatcaaacccctgcaagccacacttcttgccagccacctggcacccgaatctcagggcctcctgcatgctgtttcccttggagaggctgaagatgacagaggcattgaaggtgtctccagccccgagagtgtctactactcggggtggtgggaaggcatctgagtggagcagctggccgtcggggcccagggcatcggctccctcctcagcccaggcacagatgagcgtagcccctttcttcacacgactgtacaagcccttcagggcctcccctgctgaccggaaccccaggtgcttggccacatctttgctgacaaacaccacctctccatagccgaacagctggaagagttcctctcggggcttctctatctccacggacacccggaccttctgctgcagaggctgcgtggcattgtactgttctatccgctgtagcatctttacctgttccgatgcattccggccctcaatgtggatccacttgaaccgggtcagatcgaccttctcaaagtccttagcagacacatctggcaggttcgtgtcgtagagaataatggtacgggagccattggagttgttgacgatgcagcaggagcaaggggtatctccctggctctgccaggccacttgagacacatccacacccctccgcctgaagtcggccaccaggaagtcggcaacatggccatgggccagcgagcccatgaaggcacagcgggctccgagcaaggaaagcacagtgcaggagttggacgcgttgcctccacgctgccatctctgggataggcacctgcgatccgtgtcttcctctgggtatttgtccaccacattgatgatgtccagcaccaccagccccacgcacaggatctgcttctcttccatgaggctgctccccaagcttcctacccgcaagcggaggggattcctgctagactctgtctcttatctaccgcaggaccgtgtcccaacttctcaggggctaccctggctcctcctctgcctgcggagctcctcccgcagggtgctttctgctgttgcgagggtttggttacctagtccggccaatggcagaccctctcac

SEQ ID NO: 33 - DNA, 2461 bp, Oryctolagus cuniculus
  source 1..2461: mol_type = genomic DNA
cgagcccgggggacgagctaggaagctgaggtccgggagtgggaggtgttgccacctgcgaggccaggtcggccgcttcggggagacctcgggatcggccctcttgggccggcctgggtccttgggctgcggcggccggggccctgctccgttccctgcaccctccggcgccgccgtggactcccgggggaggagctgtgcacgcggaggaggagccggggcagcccctgggagcgggaccggccctgcgggataagaggcagggcccgggaaggcactccgacagcctggcgggcccaaagctcgggcgcagcctcatggaggagaagcagatcctgtgcgtggggctggtggtgctggacgtcatcaatgtagtggacaagtacccggaggaggacacggacagcaggtgcttgtcccagagatggcagcgtggaggcaatgcgtccaactcctgcactgtgctgtccctgctcggagccccctgtgccttcatgggctcgctggctgctgaccacgttgccgactgcgctgtgctcccctcaaccttcgtcgaactgcgccccctggctcgcttgccctggcagctttgtcctggaggacctgcgccgctattctgtggacctacgctacacagtctttcagacccagggctctgtccccacctccacagtcatcatcagcgaggccactgggagccgcaccatcctccacgcctacagcttcctggtggccgacttcaggcggcggggcgtggacgtgtctcaggtggcctggcaggacaggggagagaccccctgctcctgctgcatcgtcaacagcaccaatggttcccgtaccattgtgctctacgacacgaacctgccagatgtgtctgctaaggactttgagaaggttgatctgaaccggttcaagtggatccacattgagggacggaacgcatcggagcaggtgaagatgctgcagaggatagaacagcacaacgccaggcagcctgcagagcagaggatccgggtgtccgtggagatagagaagccccgggaggagctgttccagctgtttggctatggagaggtggtgtttgtcagcaaagacgtggccaggcacctgggcttcggctccgcggaggaagccctcaggggcttgtactcgcgtgtgcggaaaggggccacgctggtctgcgcctgggccgagcagggcgccgacgcgctgggccccgacggccagctgctgcactccgacgccgtgtcgcccccacgagtggtggatactctgggggccggagacaccttcaacgcctccgtcatcttcagcctgtcccaggggaagagcatgctggaggcactgaggtttggctgcaaggtggccggcaagaagtgtggtgtgcatggcttcgatggcatcgtgtgagaggccccaggcctggcatcgcccgtgtgtccagcctggcgtcccagctgccctgctccttgctggccgtggggaggggtctgtgtgtgccctgtgtcgcctcccacccctctccttgcagagccacagagcaaataaacctcctctgagccggcgtcccctctatctgcttcctggtggctggggactcccacggcttccaaccacggtcctccctcctcccctccattcctcaacttgaccttcacacccagaccgctacaaggaggcgctgcccaggccagggcagcaggaagtgccccagccttgccacccgccctgtcctcggggtgcagaaggctcagccgtccctgcactgggcagaggccttgagccatcaccccccccaaccccgccccgaccccctgcaggcaaggacgcttcactcgtaccctgcagcaagcctggagaaaatcgcccctgggccccaagcggctgagcccctggactggccagtgctttggcagcctctctgtggtcaggtggggccttcaccgcccaagcctgcctccttgaggggctgcctggagcctgcaaggtccaccctcggcacctgccttacggttaaggcagctgcgacccagggtccagggtcctccctctggcagatcgggtgtggagggcctgtgggaactggggactgccacgctttgcctggggtttgagtgtcccagggttcctgcgttggagttcagtcccctttgtgaggtgcgatgagggtgggaactgtggggtgtagaggcagggcctgtgcgggtgtctagacttacacaaggtcgttagggttgagctctgggattgaatcctggtggttctgtatgaaggggaccacagcgcctgtgcgcgtgcacacgctcacacacacacacacgcacgcacacacagagcatctcgccatgcggtgccctgtgccccttgggactctcagcaggaaggccatatcaccagatgtggccccaccgcctgggaccagaactgcaagccaaaataaacctcttttctttataagtta

SEQ ID NO: 34 - DNA, 2461 bp, Oryctolagus cuniculus
  source 1..2461: mol_type = genomic DNA
taacttataaagaaaagaggtttattttggcttgcagttctggtcccaggcggtggggccacatctggtgatatggccttcctgctgagagtcccaaggggcacagggcaccgcatggcgagatgctctgtgtgtgcgtgcgtgtgtgtgtgtgtgagcgtgtgcacgcgcacaggcgctgtggtccccttcatacagaaccaccaggattcaatcccagagctcaaccctaacgaccttgtgtaagtctagacacccgcacaggccctgcctctacaccccacagttcccaccctcatcgcacctcacaaaggggactgaactccaacgcaggaaccctgggacactcaaaccccaggcaaagcgtggcagtccccagttcccacaggccctccacacccgatctgccagagggaggaccctggaccctgggtcgcagctgccttaaccgtaaggcaggtgccgagggtggaccttgcaggctccaggcagcccctcaaggaggcaggcttgggcggtgaaggccccacctgaccacagagaggctgccaaagcactggccagtccaggggctcagccgcttggggcccaggggcgattttctccaggcttgctgcagggtacgagtgaagcgtccttgcctgcagggggtcggggcggggttggggggggtgatggctcaaggcctctgcccagtgcagggacggctgagccttctgcaccccgaggacagggcgggtggcaaggctggggcacttcctgctgccctggcctgggcagcgcctccttgtagcggtctgggtgtgaaggtcaagttgaggaatggaggggaggagggaggaccgtggttggaagccgtgggagtccccagccaccaggaagcagatagaggggacgccggctcagaggaggtttatttgctctgtggctctgcaaggagaggggtgggaggcgacacagggcacacacagacccctccccacggccagcaaggagcagggcagctgggacgccaggctggacacacgggcgatgccaggcctggggcctctcacacgatgccatcgaagccatgcacaccacacttcttgccggccaccttgcagccaaacctcagtgcctccagcatgctcttcccctgggacaggctgaagatgacggaggcgttgaaggtgtctccggcccccagagtatccaccactcgtgggggcgacacggcgtcggagtgcagcagctggccgtcggggcccagcgcgtcggcgccctgctcggcccaggcgcagaccagcgtggcccctttccgcacacgcgagtacaagcccctgagggcttcctccgcggagccgaagcccaggtgcctggccacgtctttgctgacaaacaccacctctccatagccaaacagctggaacagctcctcccggggcttctctatctccacggacacccggatcctctgctctgcaggctgcctggcgttgtgctgttctatcctctgcagcatcttcacctgctccgatgcgttccgtccctcaatgtggatccacttgaaccggttcagatcaaccttctcaaagtccttagcagacacatctggcaggttcgtgtcgtagagcacaatggtacgggaaccattggtgctgttgacgatgcagcaggagcagggggtctctcccctgtcctgccaggccacctgagacacgtccacgccccgccgcctgaagtcggccaccaggaagctgtaggcgtggaggatggtgcggctcccagtggcctcgctgatgatgactgtggaggtggggacagagccctgggtctgaaagactgtgtagcgtaggtccacagaatagcggcgcaggtcctccaggacaaagctgccagggcaagcgagccagggggcgcagttcgacgaaggttgaggggagcacagcgcagtcggcaacgtggtcagcagccagcgagcccatgaaggcacagggggctccgagcagggacagcacagtgcaggagttggacgcattgcctccacgctgccatctctgggacaagcacctgctgtccgtgtcctcctccgggtacttgtccactacattgatgacgtccagcaccaccagccccacgcacaggatctgcttctcctccatgaggctgcgcccgagctttgggcccgccaggctgtcggagtgccttcccgggccctgcctcttatcccgcagggccggtcccgctcccaggggctgccccggctcctcctccgcgtgcacagctcctcccccgggagtccacggcggcgccggagggtgcagggaacggagcagggccccggccgccgcagcccaaggacccaggccggcccaagagggccgatcccgaggtctccccgaagcggccgacctggcctcgcaggtggcaacacctcccactcccggacctcagcttcctagctcgtcccccgggctcg

SEQ ID NO: 35 - DNA, 1773 bp, Macaca mulatta
  source 1..1773: mol_type = genomic DNA
gggccgggcagccgcgaccacggtcttcaggcagggctgcagatgcaggcccagctctacctcgcgggtccagggtcgggagtccgagacgcaggtgcagcagagggcggggcacgtagcgcatttccagcgcattttctctttgcattctcgagatcgcttagccgcgctttagaaaggtttgcatcagctccgagtccatctgacaagcgaggaaactgaggctgagaagtgggaggcgttgccatctgcaggcccaggcaacctgctacgggaagaccgggggccaagacctccgggttggctttcccaggccagcttgggtcttcgggtgtcgggagcaaaggcccagctcctttcgtttcctgcacccctcgccgctgcaggtggctccctggaggaggagctcccacgcggaggaggagccagggcagctgggagcgaggacaccatcctcctggataacaggcagaggccgggaggaacccgtcagtcgggcgggcaggaagctctgggatcagcctcatggaagagaagcagatcctgtgcgtggggctagtggtgctggacgtcatcagcctggtggacaagtaccctaaggaggactcagagataaggtgcttgtcccagagatggcaacgcggaggcaacgcgtccaactcctgcaccgttctctccctgctcggagccccctgtgccttcatgggctcaatggcccctggccatgttgctgattttgtcctggatgacctccgccgctattctgtggacctacgctacacggtctttcagaccacgggctccgtccccatcgccacggtcatcatcaacgaggccagtggtagccgcaccatcctatactacgacagcttcctggtggccgacttcaggcggcggggtgtggacgtgtctcaggtggcctggcagagcaagggggacacccccagctcctgctgcatcatcaacaactccaatggcaaccgtaccattgtgctccatgacacgagcctgccagatgtgtctgctacggactttgagaaggttgatctgacccagttcaagtggatccacattgagggccggaacgcatcggagcaggtgaagatgctgcagcggatagacgcgcacaacaccaggcagcctccagagcagaagatccgggtgtccgtggaggtggagaagccacaagaggagctctttcagctgtttggctacggagacgtggtgtttgtcagcaaagatgtggccaagcacttggggttccagtcagcaggggaagccctgaggggcttgtatggtcgtgtgaggaaaggggctgtgcttgtctgtgcctgggctgaggagggcgccgacgccctgggccctgatggcaaactgatccactcggatgctttcccgccaccccgcgtggtggataccctgggggctggagacaccttcaatgcctccgtcatcttcagcctctcccaggggaggagcgtgcaggaagcactgagattcggatgccaggtggccggcaagaagtgtggccagcagggctttgatggcatcgtgtcagagccggtgcggtaggaggtgccggctccccgcacactatggaggctgacattgcggctgcatcgccttctcccctccatccagcctggcatccaggttgccctgctcaggggacagatgcaggctgtggggaggactccgcctgtgtcctgtgttccccacacgtctctccctgcagagcctcagagcgaataaatcttcctcagagccagcttc

SEQ ID NO: 36 - DNA, 1773 bp, Macaca mulatta
  source 1..1773: mol_type = genomic DNA
gaagctggctctgaggaagatttattcgctctgaggctctgcagggagagacgtgtggggaacacaggacacaggcggagtcctccccacagcctgcatctgtcccctgagcagggcaacctggatgccaggctggatggaggggagaaggcgatgcagccgcaatgtcagcctccatagtgtgcggggagccggcacctcctaccgcaccggctctgacacgatgccatcaaagccctgctggccacacttcttgccggccacctggcatccgaatctcagtgcttcctgcacgctcctcccctgggagaggctgaagatgacggaggcattgaaggtgtctccagcccccagggtatccaccacgcggggtggcgggaaagcatccgagtggatcagtttgccatcagggcccagggcgtcggcgccctcctcagcccaggcacagacaagcacagcccctttcctcacacgaccatacaagcccctcagggcttcccctgctgactggaaccccaagtgcttggccacatctttgctgacaaacaccacgtctccgtagccaaacagctgaaagagctcctcttgtggcttctccacctccacggacacccggatcttctgctctggaggctgcctggtgttgtgcgcgtctatccgctgcagcatcttcacctgctccgatgcgttccggccctcaatgtggatccacttgaactgggtcagatcaaccttctcaaagtccgtagcagacacatctggcaggctcgtgtcatggagcacaatggtacggttgccattggagttgttgatgatgcagcaggagctgggggtgtcccccttgctctgccaggccacctgagacacgtccacaccccgccgcctgaagtcggccaccaggaagctgtcgtagtataggatggtgcggctaccactggcctcgttgatgatgaccgtggcgatggggacggagcccgtggtctgaaagaccgtgtagcgtaggtccacagaatagcggcggaggtcatccaggacaaaatcagcaacatggccaggggccattgagcccatgaaggcacagggggctccgagcagggagagaacggtgcaggagttggacgcgttgcctccgcgttgccatctctgggacaagcaccttatctctgagtcctccttagggtacttgtccaccaggctgatgacgtccagcaccactagccccacgcacaggatctgcttctcttccatgaggctgatcccagagcttcctgcccgcccgactgacgggttcctcccggcctctgcctgttatccaggaggatggtgtcctcgctcccagctgccctggctcctcctccgcgtgggagctcctcctccagggagccacctgcagcggcgaggggtgcaggaaacgaaaggagctgggcctttgctcccgacacccgaagacccaagctggcctgggaaagccaacccggaggtcttggcccccggtcttcccgtagcaggttgcctgggcctgcagatggcaacgcctcccacttctcagcctcagtttcctcgcttgtcagatggactcggagctgatgcaaacctttctaaagcgcggctaagcgatctcgagaatgcaaagagaaaatgcgctggaaatgcgctacgtgccccgccctctgctgcacctgcgtctcggactcccgaccctggacccgcgaggtagagctgggcctgcatctgcagccctgcctgaagaccgtggtcgcggctgcccggccc

SEQ ID NO: 37 - protein, 16 aa, unidentified
  REGION 1..16: note = source = /note="Description of Unknown: RFGF peptide sequence"
AAVALLPAVLLALLAP

SEQ ID NO: 38 - protein, 11 aa, unidentified
  REGION 1..11: note = source = /note="Description of Unknown: RFGF peptide sequence"
AALLPVLLAAP

SEQ ID NO: 39 - protein, 13 aa, Human immunodeficiency virus
GRKKRRQRRRPPQ

SEQ ID NO: 40 - protein, 16 aa, Drosophila sp.
RQIKIWFQNRRMKWKK

SEQ ID NO: 41 - RNA, 21 nt, synthetic construct
  source 1..21: mol_type = other RNA
ttctctttgcattctcgagat

SEQ ID NO: 42 - RNA, 21 nt, synthetic construct
  source 1..21: mol_type = other RNA
cctgcgttgtgcagactctat

SEQ ID NO: 43 - RNA, 21 nt, synthetic construct
  source 1..21: mol_type = other RNA
agatcgcttagccgcgcttta

SEQ ID NO: 44 - RNA, 21 nt, synthetic construct
  source 1..21: mol_type = other RNA
tttctctttgcattctcgaga

SEQ ID NO: 45 - RNA, 21 nt, synthetic construct
  source 1..21: mol_type = other RNA
gtgagtccatctgacaagcga

SEQ ID NO: 46 - RNA, 21 nt, synthetic construct
  source 1..21: mol_type = other RNA
ccaactcctgcaccgttctct

SEQ ID NO: 47 - RNA, 21 nt, synthetic construct
  source 1..21: mol_type = other RNA
cttgtatggtcgtgtgaggaa

SEQ ID NO: 48 - RNA, 21 nt, synthetic construct
  source 1..21: mol_type = other RNA
gatccacattgagggccggaa

SEQ ID NO: 49 - RNA, 21 nt, synthetic construct
  source 1..21: mol_type = other RNA
gctgtttggctacggagacgt

SEQ ID NO: 50 - RNA, 21 nt, synthetic construct
  source 1..21: mol_type = other RNA
ctgccatttaattagctgcat

SEQ ID NO: 51 - RNA, 21 nt, synthetic construct
  source 1..21: mol_type = other RNA
gagaagcagatcctgtgcgtt

SEQ ID NO: 52 - RNA, 21 nt, synthetic construct
  source 1..21: mol_type = other RNA
tgagtccatctgacaagcgat

SEQ ID NO: 53 - RNA, 21 nt, synthetic construct
  source 1..21: mol_type = other RNA
cattctcgagatcgcttagct

SEQ ID NO: 54 - RNA, 21 nt, synthetic construct
  source 1..21: mol_type = other RNA
gagtccatctgacaagcgagt

SEQ ID NO: 55 - RNA, 21 nt, synthetic construct
  source 1..21: mol_type = other RNA
aagatgctgcagcggatagat

SEQ ID NO: 56 - RNA, 21 nt, synthetic construct
  source 1..21: mol_type = other RNA
attctcgagatcgcttagcct

SEQ ID NO: 57 - RNA, 21 nt, synthetic construct
  source 1..21: mol_type = other RNA
gctgagaagtgggaggcgttt

SEQ ID NO: 58 - RNA, 21 nt, synthetic construct
  source 1..21: mol_type = other RNA
atgctgcagcggatagacgca

SEQ ID NO: 59 - RNA, 21 nt, synthetic construct
  source 1..21: mol_type = other RNA
tctctttgcattctcgagatt

SEQ ID NO: 60 - RNA, 21 nt, synthetic construct
  source 1..21: mol_type = other RNA
ctctttgcattctcgagatct

SEQ ID NO: 61 - RNA, 21 nt, synthetic construct
  source 1..21: mol_type = other RNA
tggagcccaccttggaattaa

SEQ ID NO: 62 - RNA, 21 nt, synthetic construct
  source 1..21: mol_type = other RNA
cctggtggacaagtaccctaa

SEQ ID NO: 63 - RNA, 21 nt, synthetic construct
  source 1..21: mol_type = other RNA
tctcgagatcgcttagccgct

SEQ ID NO: 64 - RNA, 21 nt, synthetic construct
  source 1..21: mol_type = other RNA
agtccatctgacaagcgagga

SEQ ID NO: 65 - RNA, 21 nt, synthetic construct
  source 1..21: mol_type = other RNA
agctgtttggctacggagact

SEQ ID NO: 66 - RNA, 21 nt, synthetic construct
  source 1..21: mol_type = other RNA
gatgctgcagcggatagacgt

SEQ ID NO: 67 - RNA, 21 nt, synthetic construct
  source 1..21: mol_type = other RNA
aatctgccatttaattagctt

SEQ ID NO: 68 - RNA, 21 nt, synthetic construct
  source 1..21: mol_type = other RNA
gcattctcgagatcgcttagt

SEQ ID NO: 69 - RNA, 21 nt, synthetic construct
  source 1..21: mol_type = other RNA
ttgtatggtcgtgtgaggaaa

SEQ ID NO: 70 - RNA, 21 nt, synthetic construct
  source 1..21: mol_type = other RNA
tgaagatgctgcagcggatat

SEQ ID NO: 71 - RNA, 21 nt, synthetic construct
  source 1..21: mol_type = other RNA
ctgcagggctttgatggcatt

SEQ ID NO: 72 - RNA, 21 nt, synthetic construct
  source 1..21: mol_type = other RNA
tggctacggagacgtggtgtt

SEQ ID NO: 73 - RNA, 21 nt, synthetic construct
  source 1..21: mol_type = other RNA
gaagatgctgcagcggataga

SEQ ID NO: 74 - RNA, 21 nt, synthetic construct
  source 1..21: mol_type = other RNA
agctggagacaccttcaatgt

SEQ ID NO: 75 - RNA, 21 nt, synthetic construct
  source 1..21: mol_type = other RNA
tgtttggctacggagacgtgt

SEQ ID NO: 76 - RNA, 21 nt, synthetic construct
  source 1..21: mol_type = other RNA
tgcattctcgagatcgcttat

SEQ ID NO: 77 - RNA, 21 nt, synthetic construct
  source 1..21: mol_type = other RNA
gatcgcttagccgcgctttaa

SEQ ID NO: 78 - RNA, 21 nt, synthetic construct
  source 1..21: mol_type = other RNA
gcccaccagcctgtgatttga

SEQ ID NO: 79 - RNA, 21 nt, synthetic construct
  source 1..21: mol_type = other RNA
agacgtggtgtttgtcagcaa

SEQ ID NO: 80 - RNA, 21 nt, synthetic construct
  source 1..21: mol_type = other RNA
agatgctgcagcggatagact

SEQ ID NO: 81 - RNA, 21 nt, synthetic construct
  source 1..21: mol_type = other RNA
agaagcagatcctgtgcgtgt

SEQ ID NO: 82 - RNA, 21 nt, synthetic construct
  source 1..21: mol_type = other RNA
gcttgtatggtcgtgtgagga

SEQ ID NO: 83 - RNA, 21 nt, synthetic construct
  source 1..21: mol_type = other RNA
ttctcgagatcgcttagccgt

SEQ ID NO: 84 - RNA, 21 nt, synthetic construct
  source 1..21: mol_type = other RNA
tgagaaggttgatctgaccca

SEQ ID NO: 85 - RNA, 21 nt, synthetic construct
  source 1..21: mol_type = other RNA
ttgcattctcgagatcgctta

SEQ ID NO: 86 - RNA, 21 nt, synthetic construct
  source 1..21: mol_type = other RNA
tgcgttgtgcagactctattt

SEQ ID NO: 87 - RNA, 21 nt, synthetic construct
  source 1..21: mol_type = other RNA
tccaactcctgcaccgttctt

SEQ ID NO: 88 - RNA, 21 nt, synthetic construct
  source 1..21: mol_type = other RNA
gagatcgcttagccgcgcttt

SEQ ID NO: 89 - RNA, 21 nt, synthetic construct
  source 1..21: mol_type = other RNA
ctgtttggctacggagacgtt

SEQ ID NO: 90 - RNA, 21 nt, synthetic construct
  source 1..21: mol_type = other RNA
gagctggagacaccttcaatt

SEQ ID NO: 91 - RNA, 21 nt, synthetic construct
  source 1..21: mol_type = other RNA
ggctgagaagtgggaggcgtt

SEQ ID NO: 92 - RNA, 21 nt, synthetic construct
  source 1..21: mol_type = other RNA
gagacgtggtgtttgtcagca

SEQ ID NO: 93 - RNA, 21 nt, synthetic construct
  source 1..21: mol_type = other RNA
agagaagcagatcctgtgcgt

SEQ ID NO: 94 - RNA, 21 nt, synthetic construct
  source 1..21: mol_type = other RNA
ttttctctttgcattctcgat

SEQ ID NO: 95 - RNA, 21 nt, synthetic construct
  source 1..21: mol_type = other RNA
ggagcccaccttggaattaat

SEQ ID NO: 96 - RNA, 21 nt, synthetic construct
  source 1..21: mol_type = other RNA
tttgcattctcgagatcgctt

SEQ ID NO: 97 - RNA, 21 nt, synthetic construct
  source 1..21: mol_type = other RNA
ctccactcggatgctttccct

SEQ ID NO: 98 - RNA, 21 nt, synthetic construct
  source 1..21: mol_type = other RNA
ggcttgtatggtcgtgtgagt

SEQ ID NO: 99 - RNA, 21 nt, synthetic construct
  source 1..21: mol_type = other RNA
ggctacggagacgtggtgttt

SEQ ID NO: 100 - RNA, 21 nt, synthetic construct
  source 1..21: mol_type = other RNA
ttgagaaggttgatctgacct

SEQ ID NO: 101 - RNA, 21 nt, synthetic construct
  source 1..21: mol_type = other RNA
gagcccaccttggaattaagt

SEQ ID NO: 102 - RNA, 21 nt, synthetic construct
  source 1..21: mol_type = other RNA
cttgtctgtgcctgggctgat

SEQ ID NO: 103 - RNA, 21 nt, synthetic construct
  source 1..21: mol_type = other RNA
tctttgcattctcgagatcgt

SEQ ID NO: 104 - RNA, 21 nt, synthetic construct
  source 1..21: mol_type = other RNA
gcaggaagcactgagattcgt

SEQ ID NO: 105 - RNA, 21 nt, synthetic construct
  source 1..21: mol_type = other RNA
ctcgagatcgcttagccgcgt

SEQ ID NO: 106 - RNA, 21 nt, synthetic construct
  source 1..21: mol_type = other RNA
ggagacaccttcaatgcctct

SEQ ID NO: 107 - RNA, 21 nt, synthetic construct
  source 1..21: mol_type = other RNA
ctttgcattctcgagatcgct

SEQ ID NO: 108 - RNA, 21 nt, synthetic construct
  source 1..21: mol_type = other RNA
tggatccacattgagggccgt

SEQ ID NO: 109 - RNA, 21 nt, synthetic construct
  source 1..21: mol_type = other RNA
ctgccagatgtgtctgctaca

SEQ ID NO: 110 - RNA, 23 nt, synthetic construct
  source 1..23: mol_type = other RNA
atctcgagaatgcaaagagaaaa

SEQ ID NO: 111 - RNA, 23 nt, synthetic construct
  source 1..23: mol_type = other RNA
  modified_base 7: mod_base = OTHER; note = 5'-methyluridine-3'-phosphate
atagagtctgcacaacgcagggc

SEQ ID NO: 112 - RNA, 23 nt, synthetic construct
  source 1..23: mol_type = other RNA
taaagcgcggctaagcgatctcg

SEQ ID NO: 113 - RNA, 23 nt, synthetic construct
  source 1..23: mol_type = other RNA
tctcgagaatgcaaagagaaaat

SEQ ID NO: 114 - RNA, 23 nt, synthetic construct
  source 1..23: mol_type = other RNA
tcgcttgtcagatggactcacag

SEQ ID NO: 115 - RNA, 23 nt, synthetic construct
  source 1..23: mol_type = other RNA
agagaacggtgcaggagttggac

SEQ ID NO: 116 - RNA, 23 nt, synthetic construct
  source 1..23: mol_type = other RNA
ttcctcacacgaccatacaagcc

SEQ ID NO: 117 - RNA, 23 nt, synthetic construct
  source 1..23: mol_type = other RNA
ttccggccctcaatgtggatcca

SEQ ID NO: 118 - RNA, 23 nt, synthetic construct
  source 1..23: mol_type = other RNA
acgtctccgtagccaaacagctg

SEQ ID NO: 119 - RNA, 23 nt, synthetic construct
  source 1..23: mol_type = other RNA
atgcagctaattaaatggcagat

SEQ ID NO: 120 - RNA, 23 nt, synthetic construct
  source 1..23: mol_type = other RNA
aacgcacaggatctgcttctctt

SEQ ID NO: 121 - RNA, 23 nt, synthetic construct
  source 1..23: mol_type = other RNA
  modified_base 7: mod_base = OTHER; note = 5'-methyluridine-3'-phosphate
atcgcttgtcagatggactcaca

SEQ ID NO: 122 - RNA, 23 nt, synthetic construct
  source 1..23: mol_type = other RNA
agctaagcgatctcgagaatgca

SEQ ID NO: 123 - RNA, 23 nt, synthetic construct
  source 1..23: mol_type = other RNA
  modified_base 7: mod_base = OTHER; note = 5'-methyluridine-3'-phosphate
actcgcttgtcagatggactcac

SEQ ID NO: 124 - RNA, 23 nt, synthetic construct
  source 1..23: mol_type = other RNA
atctatccgctgcagcatcttca

SEQ ID NO: 125 - RNA, 23 nt, synthetic construct
  source 1..23: mol_type = other RNA
aggctaagcgatctcgagaatgc

SEQ ID NO: 126 - RNA, 23 nt, synthetic construct
  source 1..23: mol_type = other RNA
aaacgcctcccacttctcagcct

SEQ ID NO: 127 - RNA, 23 nt, synthetic construct
  source 1..23: mol_type = other RNA
  modified_base 7: mod_base = OTHER; note = 5'-methyluridine-3'-phosphate
tgcgtctatccgctgcagcatct

SEQ ID NO: 128 - RNA, 23 nt, synthetic construct
  source 1..23: mol_type = other RNA
aatctcgagaatgcaaagagaaa

SEQ ID NO: 129 - RNA, 23 nt, synthetic construct
  source 1..23: mol_type = other RNA
agatctcgagaatgcaaagagaa

SEQ ID NO: 130 - RNA, 23 nt, synthetic construct
  source 1..23: mol_type = other RNA
ttaattccaaggtgggctccaag

SEQ ID NO: 131 - RNA, 23 nt, synthetic construct
  source 1..23: mol_type = other RNA
  modified_base 7: mod_base = OTHER; note = 5'-methyluridine-3'-phosphate
ttagggtacttgtccaccaggct

SEQ ID NO: 132 - RNA, 23 nt, synthetic construct
  source 1..23: mol_type = other RNA
  modified_base 7: mod_base = OTHER; note = 5'-methyluridine-3'-phosphate
agcggctaagcgatctcgagaat

SEQ ID NO: 133 - RNA, 23 nt, synthetic construct
  source 1..23: mol_type = other RNA
tcctcgcttgtcagatggactca

SEQ ID NO: 134 - RNA, 23 nt, synthetic construct
  source 1..23: mol_type = other RNA
agtctccgtagccaaacagctgg

SEQ ID NO: 135 - RNA, 23 nt, synthetic construct
  source 1..23: mol_type = other RNA
acgtctatccgctgcagcatctt

SEQ ID NO: 136 - RNA, 23 nt, synthetic construct
  source 1..23: mol_type = other RNA
aagctaattaaatggcagatttt

SEQ ID NO: 137 - RNA, 23 nt, synthetic construct
  source 1..23: mol_type = other RNA
actaagcgatctcgagaatgcaa

SEQ ID NO: 138 - RNA, 23 nt, synthetic construct
  source 1..23: mol_type = other RNA
tttcctcacacgaccatacaagc

SEQ ID NO: 139 - RNA, 23 nt, synthetic construct
  source 1..23: mol_type = other RNA
atatccgctgcagcatcttcacc

SEQ ID NO: 140 - RNA, 23 nt, synthetic construct
  source 1..23: mol_type = other RNA
aatgccatcaaagccctgcaggc

SEQ ID NO: 141 - RNA, 23 nt, synthetic construct
  source 1..23: mol_type = other RNA
aacaccacgtctccgtagccaaa

SEQ ID NO: 142 - RNA, 23 nt, synthetic construct
  source 1..23: mol_type = other RNA
tctatccgctgcagcatcttcac

SEQ ID NO: 143 - RNA, 23 nt, synthetic construct
  source 1..23: mol_type = other RNA
acattgaaggtgtctccagctcc

SEQ ID NO: 144 - RNA, 23 nt, synthetic construct
  source 1..23: mol_type = other RNA
acacgtctccgtagccaaacagc

SEQ ID NO: 145 - RNA, 23 nt, synthetic construct
  source 1..23: mol_type = other RNA
ataagcgatctcgagaatgcaaa

SEQ ID NO: 146 - RNA, 23 nt, synthetic construct
  source 1..23: mol_type = other RNA
ttaaagcgcggctaagcgatctc

SEQ ID NO: 147 - RNA, 23 nt, synthetic construct
  source 1..23: mol_type = other RNA
tcaaatcacaggctggtgggcag

SEQ ID NO: 148 - RNA, 23 nt, synthetic construct
  source 1..23: mol_type = other RNA
ttgctgacaaacaccacgtctcc

SEQ ID NO: 149 - RNA, 23 nt, synthetic construct
  source 1..23: mol_type = other RNA
  modified_base 7: mod_base = OTHER; note = 5'-methyluridine-3'-phosphate
agtctatccgctgcagcatcttc

SEQ ID NO: 150 - RNA, 23 nt, synthetic construct
  source 1..23: mol_type = other RNA
acacgcacaggatctgcttctct

SEQ ID NO: 151 - RNA, 23 nt, synthetic construct
  source 1..23: mol_type = other RNA
tcctcacacgaccatacaagccc

SEQ ID NO: 152 - RNA, 23 nt, synthetic construct
  source 1..23: mol_type = other RNA
acggctaagcgatctcgagaatg

SEQ ID NO: 153 - RNA, 23 nt, synthetic construct
  source 1..23: mol_type = other RNA
tgggtcagatcaaccttctcaaa

SEQ ID NO: 154 - RNA, 23 nt, synthetic construct
  source 1..23: mol_type = other RNA
taagcgatctcgagaatgcaaag

SEQ ID NO: 155 - RNA, 23 nt, synthetic construct
  source 1..23: mol_type = other RNA
aaatagagtctgcacaacgcagg

SEQ ID NO: 156 - RNA, 23 nt, synthetic construct
  source 1..23: mol_type = other RNA
aagaacggtgcaggagttggacg

SEQ ID NO: 157 - RNA, 23 nt, synthetic construct
  source 1..23: mol_type = other RNA
aaagcgcggctaagcgatctcga

SEQ ID NO: 158 - RNA, 23 nt, synthetic construct
  source 1..23: mol_type = other RNA
  modified_base 7: mod_base = OTHER; note = 5'-methyluridine-3'-phosphate
aacgtctccgtagccaaacagct

SEQ ID NO: 159 - RNA, 23 nt, synthetic construct
  source 1..23: mol_type = other RNA
aattgaaggtgtctccagctccc

SEQ ID NO: 160 - RNA, 23 nt, synthetic construct
  source 1..23: mol_type = other RNA
  modified_base 7: mod_base = OTHER; note = 5'-methyluridine-3'-phosphate
aacgcctcccacttctcagcctt

SEQ ID NO: 161 - RNA, 23 nt, synthetic construct
  source 1..23: mol_type = other RNA
tgctgacaaacaccacgtctccg

SEQ ID NO: 162 - RNA, 23 nt, synthetic construct
  source 1..23: mol_type = other RNA
acgcacaggatctgcttctcttc

SEQ ID NO: 163 - RNA, 23 nt, synthetic construct
  source 1..23: mol_type = other RNA
atcgagaatgcaaagagaaaatg

SEQ ID NO: 164 - RNA, 23 nt, synthetic construct
  source 1..23: mol_type = other RNA
  modified_base 7: mod_base = OTHER; note = 5'-methyluridine-3'-phosphate
attaattccaaggtgggctccaa

SEQ ID NO: 165 - RNA, 23 nt, synthetic construct
  source 1..23: mol_type = other RNA
  modified_base 7: mod_base = OTHER; note = 5'-methyluridine-3'-phosphate
aagcgatctcgagaatgcaaaga

SEQ ID NO: 166 - RNA, 23 nt, synthetic construct
  source 1..23: mol_type = other RNA
agggaaagcatccgagtggagca

SEQ ID NO: 167 - RNA, 23 nt, synthetic construct
  source 1..23: mol_type = other RNA
actcacacgaccatacaagcccc

SEQ ID NO: 168 - RNA, 23 nt, synthetic construct
  source 1..23: mol_type = other RNA
aaacaccacgtctccgtagccaa

SEQ ID NO: 169 - RNA, 23 nt, synthetic construct
  source 1..23: mol_type = other RNA
aggtcagatcaaccttctcaaag

SEQ ID NO: 170 - RNA, 23 nt, synthetic construct
  source 1..23: mol_type = other RNA
  modified_base 7: mod_base = OTHER; note = 5'-methyluridine-3'-phosphate
acttaattccaaggtgggctcca

SEQ ID NO: 171 - RNA, 23 nt, synthetic construct
  source 1..23: mol_type = other RNA
atcagcccaggcacagacaagca

SEQ ID NO: 172 - RNA, 23 nt, synthetic construct
  source 1..23: mol_type = other RNA
  modified_base 7: mod_base = OTHER; note = 5'-methyluridine-3'-phosphate
acgatctcgagaatgcaaagaga

SEQ ID NO: 173 - RNA, 23 nt, synthetic construct
  source 1..23: mol_type = other RNA
acgaatctcagtgcttcctgcac

SEQ ID NO: 174 - RNA, 23 nt, synthetic construct
  source 1..23: mol_type = other RNA
acgcggctaagcgatctcgagaa

SEQ ID NO: 175 - RNA, 23 nt, synthetic construct
  source 1..23: mol_type = other RNA
agaggcattgaaggtgtctccag

SEQ ID NO: 176 - RNA, 23 nt, synthetic construct
  source 1..23: mol_type = other RNA
agcgatctcgagaatgcaaagag

SEQ ID NO: 177 - RNA, 23 nt, synthetic construct
  source 1..23: mol_type = other RNA
acggccctcaatgtggatccact

SEQ ID NO: 178 - RNA, 23 nt, synthetic construct
  source 1..23: mol_type = other RNA
tgtagcagacacatctggcaggc

SEQ ID NO: 179 - RNA, 21 nt, synthetic construct
  source 1..21: mol_type = other RNA
  modified_base 1: mod_base = OTHER; note = 2'-O-methyluridine-3'-phosphorothioate
  modified_base 2: mod_base = OTHER; note = 2'-O-methyluridine-3'-phosphorothioate
  modified_base 3: mod_base = OTHER; note = 2'-O-methylcytidine-3'-phosphate
  modified_base 4: mod_base = OTHER; note = 2'-O-methyluridine-3'-phosphate
  modified_base 5: mod_base = OTHER; note = 2'-O-methylcytidine-3'-phosphate
  modified_base 6: mod_base = OTHER; note = 2'-O-methyluridine-3'-phosphate
  modified_base 7: mod_base = OTHER; note = 2'-deoxy-2'-fluorouridine-3'-phosphate
  modified_base 8: mod_base = OTHER; note = 2'-O-methyluridine-3'-phosphate
  modified_base 9: mod_base = OTHER; note = 2'-deoxy-2'-fluoroguanosine-3'-phosphate
  modified_base 10: mod_base = OTHER; note = 2'-deoxy-2'-fluorocytidine-3'-phosphate
  modified_base 11: mod_base = OTHER; note = 2'-deoxy-2'-fluoroadenosine-3'-phosphate
  modified_base 12: mod_base = OTHER; note = 2'-O-methyluridine-3'-phosphate
  modified_base 13: mod_base = OTHER; note = 2'-O-methyluridine-3'-phosphate
  modified_base 14: mod_base = OTHER; note = 2'-O-methylcytidine-3'-phosphate
  modified_base 15: mod_base = OTHER; note = 2'-O-methyluridine-3'-phosphate
  modified_base 16: mod_base = OTHER; note = 2'-O-methylcytidine-3'-phosphate
  modified_base 17: mod_base = OTHER; note = 2'-O-methylguanosine-3'-phosphate
  modified_base 18: mod_base = OTHER; note = 2'-O-methyladenosine-3'-phosphate
  modified_base 19: mod_base = OTHER; note = 2'-O-methylguanosine-3'-phosphate
  modified_base 20: mod_base = OTHER; note = 2'-O-methyladenosine-3'-phosphate
  modified_base 21: mod_base = OTHER; note = 2'-O-methyluridine-3'-phosphate ((2S,4R)-1-[29-[[2-(acetylamino)-2-deoxy-beta-D-galactopyra nosyl]oxy]-14,14-bis[[3-[[3-[[5-[[2-(acetylamino)-2-deoxy-b eta-D-galactopyranosyl]oxy]-1-oxopentyl]amino]propyl]amino] -3-oxopropoxy]methyl]-1,12,19,25-tetraoxo-16-oxa-13,20,24-t riazanonacos-1-yl]-4-hydroxy-2-pyrrolidinyl)methyl ester
ttctctttgcattctcgagat

SEQ ID NO: 180 - RNA, 21 nt, synthetic construct
  source 1..21: mol_type = other RNA
  modified_base 1: mod_base = OTHER; note = 2'-O-methylcytidine-3'-phosphorothioate
  modified_base 2: mod_base = OTHER; note = 2'-O-methylcytidine-3'-phosphorothioate
  modified_base 3: mod_base = OTHER; note = 2'-O-methyluridine-3'-phosphate
  modified_base 4: mod_base = OTHER; note = 2'-O-methylguanosine-3'-phosphate
  modified_base 5: mod_base = OTHER; note = 2'-O-methylcytidine-3'-phosphate
  modified_base 6: mod_base = OTHER; note = 2'-O-methylguanosine-3'-phosphate
  modified_base 7: mod_base = OTHER; note = 2'-deoxy-2'-fluorouridine-3'-phosphate
  modified_base 8: mod_base = OTHER; note = 2'-O-methyluridine-3'-phosphate
  modified_base 9: mod_base = OTHER; note = 2'-deoxy-2'-fluoroguanosine-3'-phosphate
  modified_base 10: mod_base = OTHER; note = 2'-deoxy-2'-fluorouridine-3'-phosphate
  modified_base 11: mod_base = OTHER; note = 2'-deoxy-2'-fluoroguanosine-3'-phosphate
  modified_base 12: mod_base = OTHER; note = 2'-O-methylcytidine-3'-phosphate
  modified_base 13: mod_base = OTHER; note = 2'-O-methyladenosine-3'-phosphate
  modified_base 14: mod_base = OTHER; note = 2'-O-methylguanosine-3'-phosphate
  modified_base 15: mod_base = OTHER; note = 2'-O-methyladenosine-3'-phosphate
  modified_base 16: mod_base = OTHER; note = 2'-O-methylcytidine-3'-phosphate
  modified_base 17: mod_base = OTHER; note = 2'-O-methyluridine-3'-phosphate
  modified_base 18: mod_base = OTHER; note = 2'-O-methylcytidine-3'-phosphate
  modified_base 19: mod_base = OTHER; note = 2'-O-methyluridine-3'-phosphate
  modified_base 20: mod_base = OTHER; note = 2'-O-methyladenosine-3'-phosphate
  modified_base 21: mod_base = OTHER; note = 2'-O-methyluridine-3'-phosphate ((2S,4R)-1-[29-[[2-(acetylamino)-2-deoxy-beta-D-galactopyra nosyl]oxy]-14,14-bis[[3-[[3-[[5-[[2-(acetylamino)-2-deoxy-b eta-D-galactopyranosyl]oxy]-1-oxopentyl]amino]propyl]amino] -3-oxopropoxy]methyl]-1,12,19,25-tetraoxo-16-oxa-13,20,24-t riazanonacos-1-yl]-4-hydroxy-2-pyrrolidinyl)methyl ester
cctgcgttgtgcagactctat

SEQ ID NO: 181 - RNA, 21 nt, synthetic construct
  source 1..21: mol_type = other RNA
  modified_base 1: mod_base = OTHER; note = 2'-O-methyladenosine-3'-phosphorothioate
  modified_base 2: mod_base = OTHER; note = 2'-O-methylguanosine-3'-phosphorothioate
  modified_base 3: mod_base = OTHER; note = 2'-O-methyladenosine-3'-phosphate
  modified_base 4: mod_base = OTHER; note = 2'-O-methyluridine-3'-phosphate
  modified_base 5: mod_base = OTHER; note = 2'-O-methylcytidine-3'-phosphate
  modified_base 6: mod_base = OTHER; note = 2'-O-methylguanosine-3'-phosphate
  modified_base 7: mod_base = OTHER; note = 2'-deoxy-2'-fluorocytidine-3'-phosphate
  modified_base 8: mod_base = OTHER; note = 2'-O-methyluridine-3'-phosphate
  modified_base 9: mod_base = OTHER; note = 2'-deoxy-2'-fluorouridine-3'-phosphate
  modified_base 10: mod_base = OTHER; note = 2'-deoxy-2'-fluoroadenosine-3'-phosphate
  modified_base 11: mod_base = OTHER; note = 2'-deoxy-2'-fluoroguanosine-3'-phosphate
  modified_base 12: mod_base = OTHER; note = 2'-O-methylcytidine-3'-phosphate
  modified_base 13: mod_base = OTHER; note = 2'-O-methylcytidine-3'-phosphate
  modified_base 14: mod_base = OTHER; note = 2'-O-methylguanosine-3'-phosphate
  modified_base 15: mod_base = OTHER; note = 2'-O-methylcytidine-3'-phosphate
  modified_base 16: mod_base = OTHER; note = 2'-O-methylguanosine-3'-phosphate
  modified_base 17: mod_base = OTHER; note = 2'-O-methylcytidine-3'-phosphate
  modified_base 18: mod_base = OTHER; note = 2'-O-methyluridine-3'-phosphate
  modified_base 19: mod_base = OTHER; note = 2'-O-methyluridine-3'-phosphate
  modified_base 20: mod_base = OTHER; note = 2'-O-methyluridine-3'-phosphate
  modified_base 21: mod_base = OTHER; note = 2'-O-methyladenosine-3'-phosphate ((2S,4R)-1-[29-[[2-(acetylamino)-2-deoxy-beta-D-galactopyra nosyl]oxy]-14,14-bis[[3-[[3-[[5-[[2-(acetylamino)-2-deoxy-b eta-D-galactopyranosyl]oxy]-1-oxopentyl]amino]propyl]amino] -3-oxopropoxy]methyl]-1,12,19,25-tetraoxo-16-oxa-13,20,24-t riazanonacos-1-yl]-4-hydroxy-2-pyrrolidinyl)methyl ester
agatcgcttagccgcgcttta

SEQ ID NO: 182 - RNA, 21 nt, synthetic construct
  source 1..21: mol_type = other RNA
  modified_base 1: mod_base = OTHER; note = 2'-O-methyluridine-3'-phosphorothioate
  modified_base 2: mod_base = OTHER; note = 2'-O-methyluridine-3'-phosphorothioate
  modified_base 3: mod_base = OTHER; note = 2'-O-methyluridine-3'-phosphate
  modified_base 4: mod_base = OTHER; note = 2'-O-methylcytidine-3'-phosphate
  modified_base 5: mod_base = OTHER; note = 2'-O-methyluridine-3'-phosphate
  modified_base 6: mod_base = OTHER; note = 2'-O-methylcytidine-3'-phosphate
  modified_base 7: mod_base = OTHER; note = 2'-deoxy-2'-fluorouridine-3'-phosphate
  modified_base 8: mod_base = OTHER; note = 2'-O-methyluridine-3'-phosphate
  modified_base 9: mod_base = OTHER; note = 2'-deoxy-2'-fluorouridine-3'-phosphate
  modified_base 10: mod_base = OTHER; note = 2'-deoxy-2'-fluoroguanosine-3'-phosphate
  modified_base 11: mod_base = OTHER; note = 2'-deoxy-2'-fluorocytidine-3'-phosphate
  modified_base 12: mod_base = OTHER; note = 2'-O-methyladenosine-3'-phosphate
  modified_base 13: mod_base = OTHER; note = 2'-O-methyluridine-3'-phosphate
  modified_base 14: mod_base = OTHER; note = 2'-O-methyluridine-3'-phosphate
  modified_base 15: mod_base = OTHER; note = 2'-O-methylcytidine-3'-phosphate
  modified_base 16: mod_base = OTHER; note = 2'-O-methyluridine-3'-phosphate
  modified_base 17: mod_base = OTHER; note = 2'-O-methylcytidine-3'-phosphate
  modified_base 18: mod_base = OTHER; note = 2'-O-methylguanosine-3'-phosphate
  modified_base 19: mod_base = OTHER; note = 2'-O-methyladenosine-3'-phosphate
  modified_base 20: mod_base = OTHER; note = 2'-O-methylguanosine-3'-phosphate
  modified_base 21: mod_base = OTHER; note = 2'-O-methyladenosine-3'-phosphate ((2S,4R)-1-[29-[[2-(acetylamino)-2-deoxy-beta-D-galactopyra nosyl]oxy]-14,14-bis[[3-[[3-[[5-[[2-(acetylamino)-2-deoxy-b eta-D-galactopyranosyl]oxy]-1-oxopentyl]amino]propyl]amino] -3-oxopropoxy]methyl]-1,12,19,25-tetraoxo-16-oxa-13,20,24-t riazanonacos-1-yl]-4-hydroxy-2-pyrrolidinyl)methyl ester
tttctctttgcattctcgaga

SEQ ID NO: 183 - RNA, 21 nt, synthetic construct
  source 1..21: mol_type = other RNA
  modified_base 1: mod_base = OTHER; note = 2'-O-methylguanosine-3'-phosphorothioate
  modified_base 2: mod_base = OTHER; note = 2'-O-methyluridine-3'-phosphorothioate
  modified_base 3: mod_base = OTHER; note = 2'-O-methylguanosine-3'-phosphate
  modified_base 4: mod_base = OTHER; note = 2'-O-methyladenosine-3'-phosphate
  modified_base 5: mod_base = OTHER; note = 2'-O-methylguanosine-3'-phosphate
  modified_base 6: mod_base = OTHER; note = 2'-O-methyluridine-3'-phosphate
  modified_base 7: mod_base = OTHER; note = 2'-deoxy-2'-fluorocytidine-3'-phosphate
  modified_base 8: mod_base = OTHER; note = 2'-O-methylcytidine-3'-phosphate
  modified_base 9: mod_base = OTHER; note = 2'-deoxy-2'-fluoroadenosine-3'-phosphate
  modified_base 10: mod_base = OTHER; note = 2'-deoxy-2'-fluorouridine-3'-phosphate
  modified_base 11: mod_base = OTHER; note = 2'-deoxy-2'-fluorocytidine-3'-phosphate
  modified_base 12: mod_base = OTHER; note = 2'-O-methyluridine-3'-phosphate
  modified_base 13: mod_base = OTHER; note = 2'-O-methylguanosine-3'-phosphate
  modified_base 14: mod_base = OTHER; note = 2'-O-methyladenosine-3'-phosphate
  modified_base 15: mod_base = OTHER; note = 2'-O-methylcytidine-3'-phosphate
  modified_base 16: mod_base = OTHER; note = 2'-O-methyladenosine-3'-phosphate
  modified_base 17: mod_base = OTHER; note = 2'-O-methyladenosine-3'-phosphate
  modified_base 18: mod_base = OTHER; note = 2'-O-methylguanosine-3'-phosphate
  modified_base 19: mod_base = OTHER; note = 2'-O-methylcytidine-3'-phosphate
  modified_base 20: mod_base = OTHER; note = 2'-O-methylguanosine-3'-phosphate
  modified_base 21: mod_base = OTHER; note = 2'-O-methyladenosine-3'-phosphate ((2S,4R)-1-[29-[[2-(acetylamino)-2-deoxy-beta-D-galactopyra nosyl]oxy]-14,14-bis[[3-[[3-[[5-[[2-(acetylamino)-2-deoxy-b eta-D-galactopyranosyl]oxy]-1-oxopentyl]amino]propyl]amino] -3-oxopropoxy]methyl]-1,12,19,25-tetraoxo-16-oxa-13,20,24-t riazanonacos-1-yl]-4-hydroxy-2-pyrrolidinyl)methyl ester
gtgagtccatctgacaagcga

SEQ ID NO: 184 - RNA, 21 nt, synthetic construct
  source 1..21: mol_type = other RNA
  modified_base 1: mod_base = OTHER; note = 2'-O-methylcytidine-3'-phosphorothioate
  modified_base 2: mod_base = OTHER; note = 2'-O-methylcytidine-3'-phosphorothioate
  modified_base 3: mod_base = OTHER; note = 2'-O-methyladenosine-3'-phosphate
  modified_base 4: mod_base = OTHER; note = 2'-O-methyladenosine-3'-phosphate
  modified_base 5: mod_base = OTHER; note = 2'-O-methylcytidine-3'-phosphate
  modified_base 6: mod_base = OTHER; note = 2'-O-methyluridine-3'-phosphate
  modified_base 7: mod_base = OTHER; note = 2'-deoxy-2'-fluorocytidine-3'-phosphate
  modified_base 8: mod_base = OTHER; note = 2'-O-methylcytidine-3'-phosphate
  modified_base 9: mod_base = OTHER; note = 2'-deoxy-2'-fluorouridine-3'-phosphate
  modified_base 10: mod_base = OTHER; note = 2'-deoxy-2'-fluoroguanosine-3'-phosphate
  modified_base 11: mod_base = OTHER; note = 2'-deoxy-2'-fluorocytidine-3'-phosphate
  modified_base 12: mod_base = OTHER; note = 2'-O-methyladenosine-3'-phosphate
  modified_base 13: mod_base = OTHER; note = 2'-O-methylcytidine-3'-phosphate
  modified_base 14: mod_base = OTHER; note = 2'-O-methylcytidine-3'-phosphate
  modified_base 15: mod_base = OTHER; note = 2'-O-methylguanosine-3'-phosphate
  modified_base 16: mod_base = OTHER; note = 2'-O-methyluridine-3'-phosphate
  modified_base 17: mod_base = OTHER; note = 2'-O-methyluridine-3'-phosphate
  modified_base 18: mod_base = OTHER; note = 2'-O-methylcytidine-3'-phosphate
  modified_base 19: mod_base = OTHER; note = 2'-O-methyluridine-3'-phosphate
  modified_base 20: mod_base = OTHER; note = 2'-O-methylcytidine-3'-phosphate
  modified_base 21: mod_base = OTHER; note = 2'-O-methyluridine-3'-phosphate ((2S,4R)-1-[29-[[2-(acetylamino)-2-deoxy-beta-D-galactopyra nosyl]oxy]-14,14-bis[[3-[[3-[[5-[[2-(acetylamino)-2-deoxy-b eta-D-galactopyranosyl]oxy]-1-oxopentyl]amino]propyl]amino] -3-oxopropoxy]methyl]-1,12,19,25-tetraoxo-16-oxa-13,20,24-t riazanonacos-1-yl]-4-hydroxy-2-pyrrolidinyl)methyl ester
ccaactcctgcaccgttctct

SEQ ID NO: 185 - RNA, 21 nt, synthetic construct
  source 1..21: mol_type = other RNA
  modified_base 1: mod_base = OTHER; note = 2'-O-methylcytidine-3'-phosphorothioate
  modified_base 2: mod_base = OTHER; note = 2'-O-methyluridine-3'-phosphorothioate
  modified_base 3: mod_base = OTHER; note = 2'-O-methyluridine-3'-phosphate
  modified_base 4: mod_base = OTHER; note = 2'-O-methylguanosine-3'-phosphate
  modified_base 5: mod_base = OTHER; note = 2'-O-methyluridine-3'-phosphate
  modified_base 6: mod_base = OTHER; note = 2'-O-methyladenosine-3'-phosphate
  modified_base 7: mod_base = OTHER; note = 2'-deoxy-2'-fluorouridine-3'-phosphate
  modified_base 8: mod_base = OTHER; note = 2'-O-methylguanosine-3'-phosphate
  modified_base 9: mod_base = OTHER; note = 2'-deoxy-2'-fluoroguanosine-3'-phosphate
  modified_base 10: mod_base = OTHER; note = 2'-deoxy-2'-fluorouridine-3'-phosphate
  modified_base 11: mod_base = OTHER; note = 2'-deoxy-2'-fluorocytidine-3'-phosphate
  modified_base 12: mod_base = OTHER; note = 2'-O-methylguanosine-3'-phosphate
  modified_base 13: mod_base = OTHER; note = 2'-O-methyluridine-3'-phosphate
  modified_base 14: mod_base = OTHER; note = 2'-O-methylguanosine-3'-phosphate
  modified_base 15: mod_base = OTHER; note = 2'-O-methyluridine-3'-phosphate
  modified_base 16: mod_base = OTHER; note = 2'-O-methylguanosine-3'-phosphate
  modified_base 17: mod_base = OTHER; note = 2'-O-methyladenosine-3'-phosphate
  modified_base 18: mod_base = OTHER; note = 2'-O-methylguanosine-3'-phosphate
  modified_base 19: mod_base = OTHER; note = 2'-O-methylguanosine-3'-phosphate
  modified_base 20: mod_base = OTHER; note = 2'-O-methyladenosine-3'-phosphate
  modified_base 21: mod_base = OTHER; note = 2'-O-methyladenosine-3'-phosphate ((2S,4R)-1-[29-[[2-(acetylamino)-2-deoxy-beta-D-galactopyra nosyl]oxy]-14,14-bis[[3-[[3-[[5-[[2-(acetylamino)-2-deoxy-b eta-D-galactopyranosyl]oxy]-1-oxopentyl]amino]propyl]amino] -3-oxopropoxy]methyl]-1,12,19,25-tetraoxo-16-oxa-13,20,24-t riazanonacos-1-yl]-4-hydroxy-2-pyrrolidinyl)methyl ester
cttgtatggtcgtgtgaggaa

SEQ ID NO: 186 - RNA, 21 nt, synthetic construct
  source 1..21: mol_type = other RNA
  modified_base 1: mod_base = OTHER; note = 2'-O-methylguanosine-3'-phosphorothioate
  modified_base 2: mod_base = OTHER; note = 2'-O-methyladenosine-3'-phosphorothioate
  modified_base 3: mod_base = OTHER; note = 2'-O-methyluridine-3'-phosphate
  modified_base 4: mod_base = OTHER; note = 2'-O-methylcytidine-3'-phosphate
  modified_base 5: mod_base = OTHER; note = 2'-O-methylcytidine-3'-phosphate
  modified_base 6: mod_base = OTHER; note = 2'-O-methyladenosine-3'-phosphate
  modified_base 7: mod_base = OTHER; note = 2'-deoxy-2'-fluorocytidine-3'-phosphate
  modified_base 8: mod_base = OTHER; note = 2'-O-methyladenosine-3'-phosphate
  modified_base 9: mod_base = OTHER; note = 2'-deoxy-2'-fluorouridine-3'-phosphate
  modified_base 10: mod_base = OTHER; note = 2'-deoxy-2'-fluorouridine-3'-phosphate
  modified_base 11: mod_base = OTHER; note = 2'-deoxy-2'-fluoroguanosine-3'-phosphate
  modified_base 12: mod_base = OTHER; note = 2'-O-methyladenosine-3'-phosphate
  modified_base 13: mod_base = OTHER; note = 2'-O-methylguanosine-3'-phosphate
  modified_base 14: mod_base = OTHER; note = 2'-O-methylguanosine-3'-phosphate
  modified_base 15: mod_base = OTHER; note = 2'-O-methylguanosine-3'-phosphate
  modified_base 16: mod_base = OTHER; note = 2'-O-methylcytidine-3'-phosphate
  modified_base 17: mod_base = OTHER; note = 2'-O-methylcytidine-3'-phosphate
  modified_base 18: mod_base = OTHER; note = 2'-O-methylguanosine-3'-phosphate
  modified_base 19: mod_base = OTHER; note = 2'-O-methylguanosine-3'-phosphate
  modified_base 20: mod_base = OTHER; note = 2'-O-methyladenosine-3'-phosphate
  modified_base 21: mod_base = OTHER; note = 2'-O-methyladenosine-3'-phosphate ((2S,4R)-1-[29-[[2-(acetylamino)-2-deoxy-beta-D-galactopyra nosyl]oxy]-14,14-bis[[3-[[3-[[5-[[2-(acetylamino)-2-deoxy-b eta-D-galactopyranosyl]oxy]-1-oxopentyl]amino]propyl]amino] -3-oxopropoxy]methyl]-1,12,19,25-tetraoxo-16-oxa-13,20,24-t riazanonacos-1-yl]-4-hydroxy-2-pyrrolidinyl)methyl ester
gatccacattgagggccggaa

SEQ ID NO: 187 - RNA, 21 nt, synthetic construct
  source 1..21: mol_type = other RNA
  modified_base 1: mod_base = OTHER; note = 2'-O-methylguanosine-3'-phosphorothioate
  modified_base 2: mod_base = OTHER; note = 2'-O-methylcytidine-3'-phosphorothioate
  modified_base 3: mod_base = OTHER; note = 2'-O-methyluridine-3'-phosphate
  modified_base 4: mod_base = OTHER; note = 2'-O-methylguanosine-3'-phosphate
  modified_base 5: mod_base = OTHER; note = 2'-O-methyluridine-3'-phosphate
  modified_base 6: mod_base = OTHER; note = 2'-O-methyluridine-3'-phosphate
  modified_base 7: mod_base = OTHER; note = 2'-deoxy-2'-fluorouridine-3'-phosphate
  modified_base 8: mod_base = OTHER; note = 2'-O-methylguanosine-3'-phosphate
  modified_base 9: mod_base = OTHER; note = 2'-deoxy-2'-fluoroguanosine-3'-phosphate
  modified_base 10: mod_base = OTHER; note = 2'-deoxy-2'-fluorocytidine-3'-phosphate
  modified_base 11: mod_base = OTHER; note = 2'-deoxy-2'-fluorouridine-3'-phosphate
  modified_base 12: mod_base = OTHER; note = 2'-O-methyladenosine-3'-phosphate
  modified_base 13: mod_base = OTHER; note = 2'-O-methylcytidine-3'-phosphate
  modified_base 14: mod_base = OTHER; note = 2'-O-methylguanosine-3'-phosphate
  modified_base 15: mod_base = OTHER; note = 2'-O-methylguanosine-3'-phosphate
  modified_base 16: mod_base = OTHER; note = 2'-O-methyladenosine-3'-phosphate
  modified_base 17: mod_base = OTHER; note = 2'-O-methylguanosine-3'-phosphate
  modified_base 18: mod_base = OTHER; note = 2'-O-methyladenosine-3'-phosphate
  modified_base 19: mod_base = OTHER; note = 2'-O-methylcytidine-3'-phosphate
  modified_base 20: mod_base = OTHER; note = 2'-O-methylguanosine-3'-phosphate
  modified_base 21: mod_base = OTHER; note = 2'-O-methyluridine-3'-phosphate ((2S,4R)-1-[29-[[2-(acetylamino)-2-deoxy-beta-D-galactopyra nosyl]oxy]-14,14-bis[[3-[[3-[[5-[[2-(acetylamino)-2-deoxy-b eta-D-galactopyranosyl]oxy]-1-oxopentyl]amino]propyl]amino] -3-oxopropoxy]methyl]-1,12,19,25-tetraoxo-16-oxa-13,20,24-t riazanonacos-1-yl]-4-hydroxy-2-pyrrolidinyl)methyl ester
gctgtttggctacggagacgt

SEQ ID NO: 188 - RNA, 21 nt, synthetic construct
  source 1..21: mol_type = other RNA
  modified_base 1: mod_base = OTHER; note = 2'-O-methylcytidine-3'-phosphorothioate
  modified_base 2: mod_base = OTHER; note = 2'-O-methyluridine-3'-phosphorothioate
  modified_base 3: mod_base = OTHER; note = 2'-O-methylguanosine-3'-phosphate
  modified_base 4: mod_base = OTHER; note = 2'-O-methylcytidine-3'-phosphate
  modified_base 5: mod_base = OTHER; note = 2'-O-methylcytidine-3'-phosphate
  modified_base 6: mod_base = OTHER; note = 2'-O-methyladenosine-3'-phosphate
  modified_base 7: mod_base = OTHER; note = 2'-deoxy-2'-fluorouridine-3'-phosphate
  modified_base 8: mod_base = OTHER; note = 2'-O-methyluridine-3'-phosphate
  modified_base 9: mod_base = OTHER; note = 2'-deoxy-2'-fluorouridine-3'-phosphate
  modified_base 10: mod_base = OTHER; note = 2'-deoxy-2'-fluoroadenosine-3'-phosphate
  modified_base 11: mod_base = OTHER; note = 2'-deoxy-2'-fluoroadenosine-3'-phosphate
  modified_base 12: mod_base = OTHER; note = 2'-O-methyluridine-3'-phosphate
  modified_base 13: mod_base = OTHER; note = 2'-O-methyluridine-3'-phosphate
  modified_base 14: mod_base = OTHER; note = 2'-O-methyladenosine-3'-phosphate
  modified_base 15: mod_base = OTHER; note = 2'-O-methylguanosine-3'-phosphate
  modified_base 16: mod_base = OTHER; note = 2'-O-methylcytidine-3'-phosphate
  modified_base 17: mod_base = OTHER; note = 2'-O-methyluridine-3'-phosphate
  modified_base 18: mod_base = OTHER; note = 2'-O-methylguanosine-3'-phosphate
  modified_base 19: mod_base = OTHER; note = 2'-O-methylcytidine-3'-phosphate
  modified_base 20: mod_base = OTHER; note = 2'-O-methyladenosine-3'-phosphate
  modified_base 21: mod_base = OTHER; note = 2'-O-methyluridine-3'-phosphate ((2S,4R)-1-[29-[[2-(acetylamino)-2-deoxy-beta-D-galactopyra nosyl]oxy]-14,14-bis[[3-[[3-[[5-[[2-(acetylamino)-2-deoxy-b eta-D-galactopyranosyl]oxy]-1-oxopentyl]amino]propyl]amino] -3-oxopropoxy]methyl]-1,12,19,25-tetraoxo-16-oxa-13,20,24-t riazanonacos-1-yl]-4-hydroxy-2-pyrrolidinyl)methyl ester
ctgccatttaattagctgcat

SEQ ID NO: 189 - RNA, 21 nt, synthetic construct
  source 1..21: mol_type = other RNA
  modified_base 1: mod_base = OTHER; note = 2'-O-methylguanosine-3'-phosphorothioate
  modified_base 2: mod_base = OTHER; note = 2'-O-methyladenosine-3'-phosphorothioate
  modified_base 3: mod_base = OTHER; note = 2'-O-methylguanosine-3'-phosphate
  modified_base 4: mod_base = OTHER; note = 2'-O-methyladenosine-3'-phosphate
  modified_base 5: mod_base = OTHER; note = 2'-O-methyladenosine-3'-phosphate
  modified_base 6: mod_base = OTHER; note = 2'-O-methylguanosine-3'-phosphate
  modified_base 7: mod_base = OTHER; note = 2'-deoxy-2'-fluorocytidine-3'-phosphate
  modified_base 8: mod_base = OTHER; note = 2'-O-methyladenosine-3'-phosphate
  modified_base 9: mod_base = OTHER; note = 2'-deoxy-2'-fluoroguanosine-3'-phosphate
  modified_base 10: mod_base = OTHER; note = 2'-deoxy-2'-fluoroadenosine-3'-phosphate
  modified_base 11: mod_base = OTHER; note = 2'-deoxy-2'-fluorouridine-3'-phosphate
  modified_base 12: mod_base = OTHER; note = 2'-O-methylcytidine-3'-phosphate
  modified_base 13: mod_base = OTHER; note = 2'-O-methylcytidine-3'-phosphate
  modified_base 14: mod_base = OTHER; note = 2'-O-methyluridine-3'-phosphate
  modified_base 15: mod_base = OTHER; note = 2'-O-methylguanosine-3'-phosphate
  modified_base 16: mod_base = OTHER; note = 2'-O-methyluridine-3'-phosphate
  modified_base 17: mod_base = OTHER; note = 2'-O-methylguanosine-3'-phosphate
  modified_base 18: mod_base = OTHER; note = 2'-O-methylcytidine-3'-phosphate
  modified_base 19: mod_base = OTHER; note = 2'-O-methylguanosine-3'-phosphate
  modified_base 20: mod_base = OTHER; note = 2'-O-methyluridine-3'-phosphate
  modified_base 21: mod_base = OTHER; note = 2'-O-methyluridine-3'-phosphate ((2S,4R)-1-[29-[[2-(acetylamino)-2-deoxy-beta-D-galactopyra nosyl]oxy]-14,14-bis[[3-[[3-[[5-[[2-(acetylamino)-2-deoxy-b eta-D-galactopyranosyl]oxy]-1-oxopentyl]amino]propyl]amino] -3-oxopropoxy]methyl]-1,12,19,25-tetraoxo-16-oxa-13,20,24-t riazanonacos-1-yl]-4-hydroxy-2-pyrrolidinyl)methyl ester
gagaagcagatcctgtgcgtt

SEQ ID NO: 190 - RNA, 21 nt, synthetic construct
  source 1..21: mol_type = other RNA
  modified_base 1: mod_base = OTHER; note = 2'-O-methyluridine-3'-phosphorothioate
  modified_base 2: mod_base = OTHER; note = 2'-O-methylguanosine-3'-phosphorothioate
  modified_base 3: mod_base = OTHER; note = 2'-O-methyladenosine-3'-phosphate
  modified_base 4: mod_base = OTHER; note = 2'-O-methylguanosine-3'-phosphate
  modified_base 5: mod_base = OTHER; note = 2'-O-methyluridine-3'-phosphate
  modified_base 6: mod_base = OTHER; note = 2'-O-methylcytidine-3'-phosphate
  modified_base 7: mod_base = OTHER; note = 2'-deoxy-2'-fluorocytidine-3'-phosphate
  modified_base 8: mod_base = OTHER; note = 2'-O-methyladenosine-3'-phosphate
  modified_base 9: mod_base = OTHER; note = 2'-deoxy-2'-fluorouridine-3'-phosphate
  modified_base 10: mod_base = OTHER; note = 2'-deoxy-2'-fluorocytidine-3'-phosphate
  modified_base 11: mod_base = OTHER; note = 2'-deoxy-2'-fluorouridine-3'-phosphate
  modified_base 12: mod_base = OTHER; note = 2'-O-methylguanosine-3'-phosphate
  modified_base 13: mod_base = OTHER; note = 2'-O-methyladenosine-3'-phosphate
  modified_base 14: mod_base = OTHER; note = 2'-O-methylcytidine-3'-phosphate
  modified_base 15: mod_base = OTHER; note = 2'-O-methyladenosine-3'-phosphate
  modified_base 16: mod_base = OTHER; note = 2'-O-methyladenosine-3'-phosphate
  modified_base 17: mod_base = OTHER; note = 2'-O-methylguanosine-3'-phosphate
  modified_base 18: mod_base = OTHER; note = 2'-O-methylcytidine-3'-phosphate
  modified_base 19: mod_base = OTHER; note = 2'-O-methylguanosine-3'-phosphate
  modified_base 20: mod_base = OTHER; note = 2'-O-methyladenosine-3'-phosphate
  modified_base 21: mod_base = OTHER; note = 2'-O-methyluridine-3'-phosphate ((2S,4R)-1-[29-[[2-(acetylamino)-2-deoxy-beta-D-galactopyra nosyl]oxy]-14,14-bis[[3-[[3-[[5-[[2-(acetylamino)-2-deoxy-b eta-D-galactopyranosyl]oxy]-1-oxopentyl]amino]propyl]amino] -3-oxopropoxy]methyl]-1,12,19,25-tetraoxo-16-oxa-13,20,24-t riazanonacos-1-yl]-4-hydroxy-2-pyrrolidinyl)methyl ester
tgagtccatctgacaagcgat

SEQ ID NO: 191 - RNA, 21 nt, synthetic construct
  source 1..21: mol_type = other RNA
  modified_base 1: mod_base = OTHER; note = 2'-O-methylcytidine-3'-phosphorothioate
  modified_base 2: mod_base = OTHER; note = 2'-O-methyladenosine-3'-phosphorothioate
  modified_base 3: mod_base = OTHER; note = 2'-O-methyluridine-3'-phosphate
  modified_base 4: mod_base = OTHER; note = 2'-O-methyluridine-3'-phosphate
  modified_base 5: mod_base = OTHER; note = 2'-O-methylcytidine-3'-phosphate
  modified_base 6: mod_base = OTHER; note = 2'-O-methyluridine-3'-phosphate
  modified_base 7: mod_base = OTHER; note = 2'-deoxy-2'-fluorocytidine-3'-phosphate
  modified_base 8: mod_base = OTHER; note = 2'-O-methylguanosine-3'-phosphate
  modified_base 9: mod_base = OTHER; note = 2'-deoxy-2'-fluoroadenosine-3'-phosphate
  modified_base 10: mod_base = OTHER; note = 2'-deoxy-2'-fluoroguanosine-3'-phosphate
  modified_base 11: mod_base = OTHER; note = 2'-deoxy-2'-fluoroadenosine-3'-phosphate
  modified_base 12: mod_base = OTHER; note = 2'-O-methyluridine-3'-phosphate
  modified_base 13: mod_base = OTHER; note = 2'-O-methylcytidine-3'-phosphate
  modified_base 14: mod_base = OTHER; note = 2'-O-methylguanosine-3'-phosphate
  modified_base 15: mod_base = OTHER; note = 2'-O-methylcytidine-3'-phosphate
  modified_base 16: mod_base = OTHER; note = 2'-O-methyluridine-3'-phosphate
  modified_base 17: mod_base = OTHER; note = 2'-O-methyluridine-3'-phosphate
  modified_base 18: mod_base = OTHER; note = 2'-O-methyladenosine-3'-phosphate
  modified_base 19: mod_base = OTHER; note = 2'-O-methylguanosine-3'-phosphate
  modified_base 20: mod_base = OTHER; note = 2'-O-methylcytidine-3'-phosphate
  modified_base 21: mod_base = OTHER; note = 2'-O-methyluridine-3'-phosphate ((2S,4R)-1-[29-[[2-(acetylamino)-2-deoxy-beta-D-galactopyra nosyl]oxy]-14,14-bis[[3-[[3-[[5-[[2-(acetylamino)-2-deoxy-b eta-D-galactopyranosyl]oxy]-1-oxopentyl]amino]propyl]amino] -3-oxopropoxy]methyl]-1,12,19,25-tetraoxo-16-oxa-13,20,24-t riazanonacos-1-yl]-4-hydroxy-2-pyrrolidinyl)methyl ester
cattctcgagatcgcttagct

SEQ ID NO: 192 - RNA, 21 nt, synthetic construct
  source 1..21: mol_type = other RNA
  modified_base 1: mod_base = OTHER; note = 2'-O-methylguanosine-3'-phosphorothioate
  modified_base 2: mod_base = OTHER; note = 2'-O-methyladenosine-3'-phosphorothioate
  modified_base 3: mod_base = OTHER; note = 2'-O-methylguanosine-3'-phosphate
  modified_base 4: mod_base = OTHER; note = 2'-O-methyluridine-3'-phosphate
  modified_base 5: mod_base = OTHER; note = 2'-O-methylcytidine-3'-phosphate
  modified_base 6: mod_base = OTHER; note = 2'-O-methylcytidine-3'-phosphate
  modified_base 7: mod_base = OTHER; note = 2'-deoxy-2'-fluoroadenosine-3'-phosphate
  modified_base 8: mod_base = OTHER; note = 2'-O-methyluridine-3'-phosphate
  modified_base 9: mod_base = OTHER; note = 2'-deoxy-2'-fluorocytidine-3'-phosphate
  modified_base 10: mod_base = OTHER; note = 2'-deoxy-2'-fluorouridine-3'-phosphate
  modified_base 11: mod_base = OTHER; note = 2'-deoxy-2'-fluoroguanosine-3'-phosphate
  modified_base 12: mod_base = OTHER; note = 2'-O-methyladenosine-3'-phosphate
  modified_base 13: mod_base = OTHER; note = 2'-O-methylcytidine-3'-phosphate
  modified_base 14: mod_base = OTHER; note = 2'-O-methyladenosine-3'-phosphate
  modified_base 15: mod_base = OTHER; note = 2'-O-methyladenosine-3'-phosphate
  modified_base 16: mod_base = OTHER; note = 2'-O-methylguanosine-3'-phosphate
  modified_base 17: mod_base = OTHER; note = 2'-O-methylcytidine-3'-phosphate
  modified_base 18: mod_base = OTHER; note = 2'-O-methylguanosine-3'-phosphate
  modified_base 19: mod_base = OTHER; note = 2'-O-methyladenosine-3'-phosphate
  modified_base 20: mod_base = OTHER; note = 2'-O-methylguanosine-3'-phosphate
  modified_base 21: mod_base = OTHER; note = 2'-O-methyluridine-3'-phosphate ((2S,4R)-1-[29-[[2-(acetylamino)-2-deoxy-beta-D-galactopyra nosyl]oxy]-14,14-bis[[3-[[3-[[5-[[2-(acetylamino)-2-deoxy-b eta-D-galactopyranosyl]oxy]-1-oxopentyl]amino]propyl]amino] -3-oxopropoxy]methyl]-1,12,19,25-tetraoxo-16-oxa-13,20,24-t riazanonacos-1-yl]-4-hydroxy-2-pyrrolidinyl)methyl ester
gagtccatctgacaagcgagt

SEQ ID NO: 193 - RNA, 21 nt, synthetic construct
  source 1..21: mol_type = other RNA
  modified_base 1: mod_base = OTHER; note = 2'-O-methyladenosine-3'-phosphorothioate
  modified_base 2: mod_base = OTHER; note = 2'-O-methyladenosine-3'-phosphorothioate
  modified_base 3: mod_base = OTHER; note = 2'-O-methylguanosine-3'-phosphate
  modified_base 4: mod_base = OTHER; note = 2'-O-methyladenosine-3'-phosphate
  modified_base 5: mod_base = OTHER; note = 2'-O-methyluridine-3'-phosphate
  modified_base 6: mod_base = OTHER; note = 2'-O-methylguanosine-3'-phosphate
  modified_base 7: mod_base = OTHER; note = 2'-deoxy-2'-fluorocytidine-3'-phosphate
  modified_base 8: mod_base = OTHER; note = 2'-O-methyluridine-3'-phosphate
  modified_base 9: mod_base = OTHER; note = 2'-deoxy-2'-fluoroguanosine-3'-phosphate
  modified_base 10: mod_base = OTHER; note = 2'-deoxy-2'-fluorocytidine-3'-phosphate
  modified_base 11: mod_base = OTHER; note = 2'-deoxy-2'-fluoroadenosine-3'-phosphate
  modified_base 12: mod_base = OTHER; note = 2'-O-methylguanosine-3'-phosphate
  modified_base 13: mod_base = OTHER; note = 2'-O-methylcytidine-3'-phosphate
  modified_base 14: mod_base = OTHER; note = 2'-O-methylguanosine-3'-phosphate
  modified_base 15: mod_base = OTHER; note = 2'-O-methylguanosine-3'-phosphate
  modified_base 16: mod_base = OTHER; note = 2'-O-methyladenosine-3'-phosphate
  modified_base 17: mod_base = OTHER; note = 2'-O-methyluridine-3'-phosphate
  modified_base 18: mod_base = OTHER; note = 2'-O-methyladenosine-3'-phosphate
  modified_base 19: mod_base = OTHER; note = 2'-O-methylguanosine-3'-phosphate
  modified_base 20: mod_base = OTHER; note = 2'-O-methyladenosine-3'-phosphate
  modified_base 21: mod_base = OTHER; note = 2'-O-methyluridine-3'-phosphate ((2S,4R)-1-[29-[[2-(acetylamino)-2-deoxy-beta-D-galactopyra nosyl]oxy]-14,14-bis[[3-[[3-[[5-[[2-(acetylamino)-2-deoxy-b eta-D-galactopyranosyl]oxy]-1-oxopentyl]amino]propyl]amino] -3-oxopropoxy]methyl]-1,12,19,25-tetraoxo-16-oxa-13,20,24-t riazanonacos-1-yl]-4-hydroxy-2-pyrrolidinyl)methyl ester
aagatgctgcagcggatagat

SEQ ID NO: 194 - RNA, 21 nt, synthetic construct
  source 1..21: mol_type = other RNA
  modified_base 1: mod_base = OTHER; note = 2'-O-methyladenosine-3'-phosphorothioate
  modified_base 2: mod_base = OTHER; note = 2'-O-methyluridine-3'-phosphorothioate
  modified_base 3: mod_base = OTHER; note = 2'-O-methyluridine-3'-phosphate
  modified_base 4: mod_base = OTHER; note = 2'-O-methylcytidine-3'-phosphate
  modified_base 5: mod_base = OTHER; note = 2'-O-methyluridine-3'-phosphate
  modified_base 6: mod_base = OTHER; note = 2'-O-methylcytidine-3'-phosphate
  modified_base 7: mod_base = OTHER; note = 2'-deoxy-2'-fluoroguanosine-3'-phosphate
  modified_base 8: mod_base = OTHER; note = 2'-O-methyladenosine-3'-phosphate
  modified_base 9: mod_base = OTHER; note = 2'-deoxy-2'-fluoroguanosine-3'-phosphate
  modified_base 10: mod_base = OTHER; note = 2'-deoxy-2'-fluoroadenosine-3'-phosphate
  modified_base 11: mod_base = OTHER; note = 2'-deoxy-2'-fluorouridine-3'-phosphate
  modified_base 12: mod_base = OTHER; note = 2'-O-methylcytidine-3'-phosphate
  modified_base 13: mod_base = OTHER; note = 2'-O-methylguanosine-3'-phosphate
  modified_base 14: mod_base = OTHER; note = 2'-O-methylcytidine-3'-phosphate
  modified_base 15: mod_base = OTHER; note = 2'-O-methyluridine-3'-phosphate
  modified_base 16: mod_base = OTHER; note = 2'-O-methyluridine-3'-phosphate
  modified_base 17: mod_base = OTHER; note = 2'-O-methyladenosine-3'-phosphate
  modified_base 18: mod_base = OTHER; note = 2'-O-methylguanosine-3'-phosphate
  modified_base 19: mod_base = OTHER; note = 2'-O-methylcytidine-3'-phosphate
  modified_base 20: mod_base = OTHER; note = 2'-O-methylcytidine-3'-phosphate
  modified_base 21: mod_base = OTHER; note = 2'-O-methyluridine-3'-phosphate ((2S,4R)-1-[29-[[2-(acetylamino)-2-deoxy-beta-D-galactopyra nosyl]oxy]-14,14-bis[[3-[[3-[[5-[[2-(acetylamino)-2-deoxy-b eta-D-galactopyranosyl]oxy]-1-oxopentyl]amino]propyl]amino] -3-oxopropoxy]methyl]-1,12,19,25-tetraoxo-16-oxa-13,20,24-t riazanonacos-1-yl]-4-hydroxy-2-pyrrolidinyl)methyl ester
attctcgagatcgcttagcct

SEQ ID NO: 195 - RNA, 21 nt, synthetic construct
  source 1..21: mol_type = other RNA
  modified_base 1: mod_base = OTHER; note = 2'-O-methylguanosine-3'-phosphorothioate
  modified_base 2: mod_base = OTHER; note = 2'-O-methylcytidine-3'-phosphorothioate
  modified_base 3: mod_base = OTHER; note = 2'-O-methyluridine-3'-phosphate
  modified_base 4: mod_base = OTHER; note = 2'-O-methylguanosine-3'-phosphate
  modified_base 5: mod_base = OTHER; note = 2'-O-methyladenosine-3'-phosphate
  modified_base 6: mod_base = OTHER; note = 2'-O-methylguanosine-3'-phosphate
  modified_base 7: mod_base = OTHER; note = 2'-deoxy-2'-fluoroadenosine-3'-phosphate
  modified_base 8: mod_base = OTHER; note = 2'-O-methyladenosine-3'-phosphate
  modified_base 9: mod_base = OTHER; note = 2'-deoxy-2'-fluoroguanosine-3'-phosphate
  modified_base 10: mod_base = OTHER; note = 2'-deoxy-2'-fluorouridine-3'-phosphate
  modified_base 11: mod_base = OTHER; note = 2'-deoxy-2'-fluoroguanosine-3'-phosphate
  modified_base 12: mod_base = OTHER; note = 2'-O-methylguanosine-3'-phosphate
  modified_base 13: mod_base = OTHER; note = 2'-O-methylguanosine-3'-phosphate
  modified_base 14: mod_base = OTHER; note = 2'-O-methyladenosine-3'-phosphate
  modified_base 15: mod_base = OTHER; note = 2'-O-methylguanosine-3'-phosphate
  modified_base 16: mod_base = OTHER; note = 2'-O-methylguanosine-3'-phosphate
  modified_base 17: mod_base = OTHER; note = 2'-O-methylcytidine-3'-phosphate
  modified_base 18: mod_base = OTHER; note = 2'-O-methylguanosine-3'-phosphate
  modified_base 19: mod_base = OTHER; note = 2'-O-methyluridine-3'-phosphate
  modified_base 20: mod_base = OTHER; note = 2'-O-methyluridine-3'-phosphate
  modified_base 21: mod_base = OTHER; note = 2'-O-methyluridine-3'-phosphate ((2S,4R)-1-[29-[[2-(acetylamino)-2-deoxy-beta-D-galactopyra nosyl]oxy]-14,14-bis[[3-[[3-[[5-[[2-(acetylamino)-2-deoxy-b eta-D-galactopyranosyl]oxy]-1-oxopentyl]amino]propyl]amino] -3-oxopropoxy]methyl]-1,12,19,25-tetraoxo-16-oxa-13,20,24-t riazanonacos-1-yl]-4-hydroxy-2-pyrrolidinyl)methyl ester
gctgagaagtgggaggcgttt

SEQ ID NO: 196 - RNA, 21 nt, synthetic construct
  source 1..21: mol_type = other RNA
  modified_base 1: mod_base = OTHER; note = 2'-O-methyladenosine-3'-phosphorothioate
  modified_base 2: mod_base = OTHER; note = 2'-O-methyluridine-3'-phosphorothioate
  modified_base 3: mod_base = OTHER; note = 2'-O-methylguanosine-3'-phosphate
  modified_base 4: mod_base = OTHER; note = 2'-O-methylcytidine-3'-phosphate
  modified_base 5: mod_base = OTHER; note = 2'-O-methyluridine-3'-phosphate
  modified_base 6: mod_base = OTHER; note = 2'-O-methylguanosine-3'-phosphate
  modified_base 7: mod_base = OTHER; note = 2'-deoxy-2'-fluorocytidine-3'-phosphate
  modified_base 8: mod_base = OTHER; note = 2'-O-methyladenosine-3'-phosphate
  modified_base 9: mod_base = OTHER; note = 2'-deoxy-2'-fluoroguanosine-3'-phosphate
  modified_base 10: mod_base = OTHER; note = 2'-deoxy-2'-fluorocytidine-3'-phosphate
  modified_base 11: mod_base = OTHER; note = 2'-deoxy-2'-fluoroguanosine-3'-phosphate
  modified_base 12: mod_base = OTHER; note = 2'-O-methylguanosine-3'-phosphate
  modified_base 13: mod_base = OTHER; note = 2'-O-methyladenosine-3'-phosphate
  modified_base 14: mod_base = OTHER; note = 2'-O-methyluridine-3'-phosphate
  modified_base 15: mod_base = OTHER; note = 2'-O-methyladenosine-3'-phosphate
  modified_base 16: mod_base = OTHER; note = 2'-O-methylguanosine-3'-phosphate
  modified_base 17: mod_base = OTHER; note = 2'-O-methyladenosine-3'-phosphate
  modified_base 18: mod_base = OTHER; note = 2'-O-methylcytidine-3'-phosphate
  modified_base 19: mod_base = OTHER; note = 2'-O-methylguanosine-3'-phosphate
  modified_base 20: mod_base = OTHER; note = 2'-O-methylcytidine-3'-phosphate
  modified_base 21: mod_base = OTHER; note = 2'-O-methyladenosine-3'-phosphate ((2S,4R)-1-[29-[[2-(acetylamino)-2-deoxy-beta-D-galactopyra nosyl]oxy]-14,14-bis[[3-[[3-[[5-[[2-(acetylamino)-2-deoxy-b eta-D-galactopyranosyl]oxy]-1-oxopentyl]amino]propyl]amino] -3-oxopropoxy]methyl]-1,12,19,25-tetraoxo-16-oxa-13,20,24-t riazanonacos-1-yl]-4-hydroxy-2-pyrrolidinyl)methyl ester
atgctgcagcggatagacgca

SEQ ID NO: 197 - RNA, 21 nt, synthetic construct
  source 1..21: mol_type = other RNA
  modified_base 1: mod_base = OTHER; note = 2'-O-methyluridine-3'-phosphorothioate
  modified_base 2: mod_base = OTHER; note = 2'-O-methylcytidine-3'-phosphorothioate
  modified_base 3: mod_base = OTHER; note = 2'-O-methyluridine-3'-phosphate
  modified_base 4: mod_base = OTHER; note = 2'-O-methylcytidine-3'-phosphate
  modified_base 5: mod_base = OTHER; note = 2'-O-methyluridine-3'-phosphate
  modified_base 6: mod_base = OTHER; note = 2'-O-methyluridine-3'-phosphate
  modified_base 7: mod_base = OTHER; note = 2'-deoxy-2'-fluorouridine-3'-phosphate
  modified_base 8: mod_base = OTHER; note = 2'-O-methylguanosine-3'-phosphate
  modified_base 9: mod_base = OTHER; note = 2'-deoxy-2'-fluorocytidine-3'-phosphate
  modified_base 10: mod_base = OTHER; note = 2'-deoxy-2'-fluoroadenosine-3'-phosphate
  modified_base 11: mod_base = OTHER; note = 2'-deoxy-2'-fluorouridine-3'-phosphate
  modified_base 12: mod_base = OTHER; note = 2'-O-methyluridine-3'-phosphate
  modified_base 13: mod_base = OTHER; note = 2'-O-methylcytidine-3'-phosphate
  modified_base 14: mod_base = OTHER; note = 2'-O-methyluridine-3'-phosphate
  modified_base 15: mod_base = OTHER; note = 2'-O-methylcytidine-3'-phosphate
  modified_base 16: mod_base = OTHER; note = 2'-O-methylguanosine-3'-phosphate
  modified_base 17: mod_base = OTHER; note = 2'-O-methyladenosine-3'-phosphate
  modified_base 18: mod_base = OTHER; note = 2'-O-methylguanosine-3'-phosphate
  modified_base 19: mod_base = OTHER; note = 2'-O-methyladenosine-3'-phosphate
  modified_base 20: mod_base = OTHER; note = 2'-O-methyluridine-3'-phosphate
  modified_base 21: mod_base = OTHER; note = 2'-O-methyluridine-3'-phosphate ((2S,4R)-1-[29-[[2-(acetylamino)-2-deoxy-beta-D-galactopyra nosyl]oxy]-14,14-bis[[3-[[3-[[5-[[2-(acetylamino)-2-deoxy-b eta-D-galactopyranosyl]oxy]-1-oxopentyl]amino]propyl]amino] -3-oxopropoxy]methyl]-1,12,19,25-tetraoxo-16-oxa-13,20,24-t riazanonacos-1-yl]-4-hydroxy-2-pyrrolidinyl)methyl ester
tctctttgcattctcgagatt

SEQ ID NO: 198 - RNA, 21 nt, synthetic construct
  source 1..21: mol_type = other RNA
  modified_base 1: mod_base = OTHER; note = 2'-O-methylcytidine-3'-phosphorothioate
  modified_base 2: mod_base = OTHER; note = 2'-O-methyluridine-3'-phosphorothioate
  modified_base 3: mod_base = OTHER; note = 2'-O-methylcytidine-3'-phosphate
  modified_base 4: mod_base = OTHER; note = 2'-O-methyluridine-3'-phosphate
  modified_base 5: mod_base = OTHER; note = 2'-O-methyluridine-3'-phosphate
  modified_base 6: mod_base = OTHER; note = 2'-O-methyluridine-3'-phosphate
  modified_base 7: mod_base = OTHER; note = 2'-deoxy-2'-fluoroguanosine-3'-phosphate
  modified_base 8: mod_base = OTHER; note = 2'-O-methylcytidine-3'-phosphate
  modified_base 9: mod_base = OTHER; note = 2'-deoxy-2'-fluoroadenosine-3'-phosphate
  modified_base 10: mod_base = OTHER; note = 2'-deoxy-2'-fluorouridine-3'-phosphate
  modified_base 11: mod_base = OTHER; note = 2'-deoxy-2'-fluorouridine-3'-phosphate
  modified_base 12: mod_base = OTHER; note = 2'-O-methylcytidine-3'-phosphate
  modified_base 13: mod_base = OTHER; note = 2'-O-methyluridine-3'-phosphate
  modified_base 14: mod_base = OTHER; note = 2'-O-methylcytidine-3'-phosphate
  modified_base 15: mod_base = OTHER; note = 2'-O-methylguanosine-3'-phosphate
  modified_base 16: mod_base = OTHER; note = 2'-O-methyladenosine-3'-phosphate
  modified_base 17: mod_base = OTHER; note = 2'-O-methylguanosine-3'-phosphate
  modified_base 18: mod_base = OTHER; note = 2'-O-methyladenosine-3'-phosphate
  modified_base 19: mod_base = OTHER; note = 2'-O-methyluridine-3'-phosphate
  modified_base 20: mod_base = OTHER; note = 2'-O-methylcytidine-3'-phosphate
  modified_base 21: mod_base = OTHER; note = 2'-O-methyluridine-3'-phosphate ((2S,4R)-1-[29-[[2-(acetylamino)-2-deoxy-beta-D-galactopyra nosyl]oxy]-14,14-bis[[3-[[3-[[5-[[2-(acetylamino)-2-deoxy-b eta-D-galactopyranosyl]oxy]-1-oxopentyl]amino]propyl]amino] -3-oxopropoxy]methyl]-1,12,19,25-tetraoxo-16-oxa-13,20,24-t riazanonacos-1-yl]-4-hydroxy-2-pyrrolidinyl)methyl ester
ctctttgcattctcgagatct

SEQ ID NO: 199 - RNA, 21 nt, synthetic construct
  source 1..21: mol_type = other RNA
  modified_base 1: mod_base = OTHER; note = 2'-O-methyluridine-3'-phosphorothioate
  modified_base 2: mod_base = OTHER; note = 2'-O-methylguanosine-3'-phosphorothioate
  modified_base 3: mod_base = OTHER; note = 2'-O-methylguanosine-3'-phosphate
  modified_base 4: mod_base = OTHER; note = 2'-O-methyladenosine-3'-phosphate
  modified_base 5: mod_base = OTHER; note = 2'-O-methylguanosine-3'-phosphate
  modified_base 6: mod_base = OTHER; note = 2'-O-methylcytidine-3'-phosphate
  modified_base 7: mod_base = OTHER; note = 2'-deoxy-2'-fluorocytidine-3'-phosphate
  modified_base 8: mod_base = OTHER; note = 2'-O-methylcytidine-3'-phosphate
  modified_base 9: mod_base = OTHER; note = 2'-deoxy-2'-fluoroadenosine-3'-phosphate
  modified_base 10: mod_base = OTHER; note = 2'-deoxy-2'-fluorocytidine-3'-phosphate
  modified_base 11: mod_base = OTHER; note = 2'-deoxy-2'-fluorocytidine-3'-phosphate
  modified_base 12: mod_base = OTHER; note = 2'-O-methyluridine-3'-phosphate
  modified_base 13: mod_base = OTHER; note = 2'-O-methyluridine-3'-phosphate
  modified_base 14: mod_base = OTHER; note = 2'-O-methylguanosine-3'-phosphate
  modified_base 15: mod_base = OTHER; note = 2'-O-methylguanosine-3'-phosphate
  modified_base 16: mod_base = OTHER; note = 2'-O-methyladenosine-3'-phosphate
  modified_base 17: mod_base = OTHER; note = 2'-O-methyladenosine-3'-phosphate
  modified_base 18: mod_base = OTHER; note = 2'-O-methyluridine-3'-phosphate
  modified_base 19: mod_base = OTHER; note = 2'-O-methyluridine-3'-phosphate
  modified_base 20: mod_base = OTHER; note = 2'-O-methyladenosine-3'-phosphate
  modified_base 21: mod_base = OTHER; note = 2'-O-methyladenosine-3'-phosphate ((2S,4R)-1-[29-[[2-(acetylamino)-2-deoxy-beta-D-galactopyra nosyl]oxy]-14,14-bis[[3-[[3-[[5-[[2-(acetylamino)-2-deoxy-b eta-D-galactopyranosyl]oxy]-1-oxopentyl]amino]propyl]amino] -3-oxopropoxy]methyl]-1,12,19,25-tetraoxo-16-oxa-13,20,24-t riazanonacos-1-yl]-4-hydroxy-2-pyrrolidinyl)methyl ester
tggagcccaccttggaattaa

SEQ ID NO: 200 - RNA, 21 nt, synthetic construct
  source 1..21: mol_type = other RNA
  modified_base 1: mod_base = OTHER; note = 2'-O-methylcytidine-3'-phosphorothioate
  modified_base 2: mod_base = OTHER; note = 2'-O-methylcytidine-3'-phosphorothioate
  modified_base 3: mod_base = OTHER; note = 2'-O-methyluridine-3'-phosphate
  modified_base 4: mod_base = OTHER; note = 2'-O-methylguanosine-3'-phosphate
  modified_base 5: mod_base = OTHER; note = 2'-O-methylguanosine-3'-phosphate
  modified_base 6: mod_base = OTHER; note = 2'-O-methyluridine-3'-phosphate
  modified_base 7: mod_base = OTHER; note = 2'-deoxy-2'-fluoroguanosine-3'-phosphate
  modified_base 8: mod_base = OTHER; note = 2'-O-methylguanosine-3'-phosphate
  modified_base 9: mod_base = OTHER; note = 2'-deoxy-2'-fluoroadenosine-3'-phosphate
  modified_base 10: mod_base = OTHER; note = 2'-deoxy-2'-fluorocytidine-3'-phosphate
  modified_base 11: mod_base = OTHER; note = 2'-deoxy-2'-fluoroadenosine-3'-phosphate
  modified_base 12: mod_base = OTHER; note = 2'-O-methyladenosine-3'-phosphate
  modified_base 13: mod_base = OTHER; note = 2'-O-methylguanosine-3'-phosphate
  modified_base 14: mod_base = OTHER; note = 2'-O-methyluridine-3'-phosphate
  modified_base 15: mod_base = OTHER; note = 2'-O-methyladenosine-3'-phosphate
  modified_base 16: mod_base = OTHER; note = 2'-O-methylcytidine-3'-phosphate
  modified_base 17: mod_base = OTHER; note = 2'-O-methylcytidine-3'-phosphate
  modified_base 18: mod_base = OTHER; note = 2'-O-methylcytidine-3'-phosphate
  modified_base 19: mod_base = OTHER; note = 2'-O-methyluridine-3'-phosphate
  modified_base 20: mod_base = OTHER; note = 2'-O-methyladenosine-3'-phosphate
  modified_base 21: mod_base = OTHER; note = 2'-O-methyladenosine-3'-phosphate ((2S,4R)-1-[29-[[2-(acetylamino)-2-deoxy-beta-D-galactopyra nosyl]oxy]-14,14-bis[[3-[[3-[[5-[[2-(acetylamino)-2-deoxy-b eta-D-galactopyranosyl]oxy]-1-oxopentyl]amino]propyl]amino] -3-oxopropoxy]methyl]-1,12,19,25-tetraoxo-16-oxa-13,20,24-t riazanonacos-1-yl]-4-hydroxy-2-pyrrolidinyl)methyl ester
cctggtggacaagtaccctaa

SEQ ID NO: 201 - RNA, 21 nt, synthetic construct
  source 1..21: mol_type = other RNA
  modified_base 1: mod_base = OTHER; note = 2'-O-methyluridine-3'-phosphorothioate
  modified_base 2: mod_base = OTHER; note = 2'-O-methylcytidine-3'-phosphorothioate
  modified_base 3: mod_base = OTHER; note = 2'-O-methyluridine-3'-phosphate
  modified_base 4: mod_base = OTHER; note = 2'-O-methylcytidine-3'-phosphate
  modified_base 5: mod_base = OTHER; note = 2'-O-methylguanosine-3'-phosphate
  modified_base 6: mod_base = OTHER; note = 2'-O-methyladenosine-3'-phosphate
  modified_base 7: mod_base = OTHER; note = 2'-deoxy-2'-fluoroguanosine-3'-phosphate
  modified_base 8: mod_base = OTHER; note = 2'-O-methyladenosine-3'-phosphate
  modified_base 9: mod_base = OTHER; note = 2'-deoxy-2'-fluorouridine-3'-phosphate
  modified_base 10: mod_base = OTHER; note = 2'-deoxy-2'-fluorocytidine-3'-phosphate
  modified_base 11: mod_base = OTHER; note = 2'-deoxy-2'-fluoroguanosine-3'-phosphate
  modified_base 12: mod_base = OTHER; note = 2'-O-methylcytidine-3'-phosphate
  modified_base 13: mod_base = OTHER; note = 2'-O-methyluridine-3'-phosphate
  modified_base 14: mod_base = OTHER; note = 2'-O-methyluridine-3'-phosphate
  modified_base 15: mod_base = OTHER; note = 2'-O-methyladenosine-3'-phosphate
  modified_base 16: mod_base = OTHER; note = 2'-O-methylguanosine-3'-phosphate
  modified_base 17: mod_base = OTHER; note = 2'-O-methylcytidine-3'-phosphate
  modified_base 18: mod_base = OTHER; note = 2'-O-methylcytidine-3'-phosphate
  modified_base 19: mod_base = OTHER; note = 2'-O-methylguanosine-3'-phosphate
  modified_base 20: mod_base = OTHER; note = 2'-O-methylcytidine-3'-phosphate
  modified_base 21: mod_base = OTHER; note = 2'-O-methyluridine-3'-phosphate ((2S,4R)-1-[29-[[2-(acetylamino)-2-deoxy-beta-D-galactopyra nosyl]oxy]-14,14-bis[[3-[[3-[[5-[[2-(acetylamino)-2-deoxy-b eta-D-galactopyranosyl]oxy]-1-oxopentyl]amino]propyl]amino] -3-oxopropoxy]methyl]-1,12,19,25-tetraoxo-16-oxa-13,20,24-t riazanonacos-1-yl]-4-hydroxy-2-pyrrolidinyl)methyl ester
tctcgagatcgcttagccgct

SEQ ID NO: 202 - RNA, 21 nt, synthetic construct
  source 1..21: mol_type = other RNA
  modified_base 1: mod_base = OTHER; note = 2'-O-methyladenosine-3'-phosphorothioate
  modified_base 2: mod_base = OTHER; note = 2'-O-methylguanosine-3'-phosphorothioate
  modified_base 3: mod_base = OTHER; note = 2'-O-methyluridine-3'-phosphate
  modified_base 4: mod_base = OTHER; note = 2'-O-methylcytidine-3'-phosphate
  modified_base 5: mod_base = OTHER; note = 2'-O-methylcytidine-3'-phosphate
  modified_base 6: mod_base = OTHER; note = 2'-O-methyladenosine-3'-phosphate
  modified_base 7: mod_base = OTHER; note = 2'-deoxy-2'-fluorouridine-3'-phosphate
  modified_base 8: mod_base = OTHER; note = 2'-O-methylcytidine-3'-phosphate
  modified_base 9: mod_base = OTHER; note = 2'-deoxy-2'-fluorouridine-3'-phosphate
  modified_base 10: mod_base = OTHER; note = 2'-deoxy-2'-fluoroguanosine-3'-phosphate
  modified_base 11: mod_base = OTHER; note = 2'-deoxy-2'-fluoroadenosine-3'-phosphate
  modified_base 12: mod_base = OTHER; note = 2'-O-methylcytidine-3'-phosphate
  modified_base 13: mod_base = OTHER; note = 2'-O-methyladenosine-3'-phosphate
  modified_base 14: mod_base = OTHER; note = 2'-O-methyladenosine-3'-phosphate
  modified_base 15: mod_base = OTHER; note = 2'-O-methylguanosine-3'-phosphate
  modified_base 16: mod_base = OTHER; note = 2'-O-methylcytidine-3'-phosphate
  modified_base 17: mod_base = OTHER; note = 2'-O-methylguanosine-3'-phosphate
  modified_base 18: mod_base = OTHER; note = 2'-O-methyladenosine-3'-phosphate
  modified_base 19: mod_base = OTHER; note = 2'-O-methylguanosine-3'-phosphate
  modified_base 20: mod_base = OTHER; note = 2'-O-methylguanosine-3'-phosphate
  modified_base 21: mod_base = OTHER; note = 2'-O-methyladenosine-3'-phosphate ((2S,4R)-1-[29-[[2-(acetylamino)-2-deoxy-beta-D-galactopyra nosyl]oxy]-14,14-bis[[3-[[3-[[5-[[2-(acetylamino)-2-deoxy-b eta-D-galactopyranosyl]oxy]-1-oxopentyl]amino]propyl]amino] -3-oxopropoxy]methyl]-1,12,19,25-tetraoxo-16-oxa-13,20,24-t riazanonacos-1-yl]-4-hydroxy-2-pyrrolidinyl)methyl ester
agtccatctgacaagcgagga

SEQ ID NO: 203 - RNA, 21 nt, synthetic construct
  source 1..21: mol_type = other RNA
  modified_base 1: mod_base = OTHER; note = 2'-O-methyladenosine-3'-phosphorothioate
  modified_base 2: mod_base = OTHER; note = 2'-O-methylguanosine-3'-phosphorothioate
  modified_base 3: mod_base = OTHER; note = 2'-O-methylcytidine-3'-phosphate
  modified_base 4: mod_base = OTHER; note = 2'-O-methyluridine-3'-phosphate
  modified_base 5: mod_base = OTHER; note = 2'-O-methylguanosine-3'-phosphate
  modified_base 6: mod_base = OTHER; note = 2'-O-methyluridine-3'-phosphate
  modified_base 7: mod_base = OTHER; note = 2'-deoxy-2'-fluorouridine-3'-phosphate
  modified_base 8: mod_base = OTHER; note = 2'-O-methyluridine-3'-phosphate
  modified_base 9: mod_base = OTHER; note = 2'-deoxy-2'-fluoroguanosine-3'-phosphate
  modified_base 10: mod_base = OTHER; note = 2'-deoxy-2'-fluoroguanosine-3'-phosphate
  modified_base 11: mod_base = OTHER; note = 2'-deoxy-2'-fluorocytidine-3'-phosphate
  modified_base 12: mod_base = OTHER; note = 2'-O-methyluridine-3'-phosphate
  modified_base 13: mod_base = OTHER; note = 2'-O-methyladenosine-3'-phosphate
  modified_base 14: mod_base = OTHER; note = 2'-O-methylcytidine-3'-phosphate
  modified_base 15: mod_base = OTHER; note = 2'-O-methylguanosine-3'-phosphate
  modified_base 16: mod_base = OTHER; note = 2'-O-methylguanosine-3'-phosphate
  modified_base 17: mod_base = OTHER; note = 2'-O-methyladenosine-3'-phosphate
  modified_base 18: mod_base = OTHER; note = 2'-O-methylguanosine-3'-phosphate
  modified_base 19: mod_base = OTHER; note = 2'-O-methyladenosine-3'-phosphate
  modified_base 20: mod_base = OTHER; note = 2'-O-methylcytidine-3'-phosphate
  modified_base 21: mod_base = OTHER; note = 2'-O-methyluridine-3'-phosphate ((2S,4R)-1-[29-[[2-(acetylamino)-2-deoxy-beta-D-galactopyra nosyl]oxy]-14,14-bis[[3-[[3-[[5-[[2-(acetylamino)-2-deoxy-b eta-D-galactopyranosyl]oxy]-1-oxopentyl]amino]propyl]amino] -3-oxopropoxy]methyl]-1,12,19,25-tetraoxo-16-oxa-13,20,24-t riazanonacos-1-yl]-4-hydroxy-2-pyrrolidinyl)methyl ester
agctgtttggctacggagact

SEQ ID NO: 204 - RNA, 21 nt, synthetic construct
  source 1..21: mol_type = other RNA
  modified_base 1: mod_base = OTHER; note = 2'-O-methylguanosine-3'-phosphorothioate
  modified_base 2: mod_base = OTHER; note = 2'-O-methyladenosine-3'-phosphorothioate
  modified_base 3: mod_base = OTHER; note = 2'-O-methyluridine-3'-phosphate
  modified_base 4: mod_base = OTHER; note = 2'-O-methylguanosine-3'-phosphate
  modified_base 5: mod_base = OTHER; note = 2'-O-methylcytidine-3'-phosphate
  modified_base 6: mod_base = OTHER; note = 2'-O-methyluridine-3'-phosphate
  modified_base 7: mod_base = OTHER; note = 2'-deoxy-2'-fluoroguanosine-3'-phosphate
  modified_base 8: mod_base = OTHER; note = 2'-O-methylcytidine-3'-phosphate
  modified_base 9: mod_base = OTHER; note = 2'-deoxy-2'-fluoroadenosine-3'-phosphate
  modified_base 10: mod_base = OTHER; note = 2'-deoxy-2'-fluoroguanosine-3'-phosphate
  modified_base 11: mod_base = OTHER; note = 2'-deoxy-2'-fluorocytidine-3'-phosphate
  modified_base 12: mod_base = OTHER; note = 2'-O-methylguanosine-3'-phosphate
  modified_base 13: mod_base = OTHER; note = 2'-O-methylguanosine-3'-phosphate
  modified_base 14: mod_base = OTHER; note = 2'-O-methyladenosine-3'-phosphate
  modified_base 15: mod_base = OTHER; note = 2'-O-methyluridine-3'-phosphate
  modified_base 16: mod_base = OTHER; note = 2'-O-methyladenosine-3'-phosphate
  modified_base 17: mod_base = OTHER; note = 2'-O-methylguanosine-3'-phosphate
  modified_base 18: mod_base = OTHER; note = 2'-O-methyladenosine-3'-phosphate
  modified_base 19: mod_base = OTHER; note = 2'-O-methylcytidine-3'-phosphate
  modified_base 20: mod_base = OTHER; note = 2'-O-methylguanosine-3'-phosphate
  modified_base 21: mod_base = OTHER; note = 2'-O-methyluridine-3'-phosphate ((2S,4R)-1-[29-[[2-(acetylamino)-2-deoxy-beta-D-galactopyra nosyl]oxy]-14,14-bis[[3-[[3-[[5-[[2-(acetylamino)-2-deoxy-b eta-D-galactopyranosyl]oxy]-1-oxopentyl]amino]propyl]amino] -3-oxopropoxy]methyl]-1,12,19,25-tetraoxo-16-oxa-13,20,24-t riazanonacos-1-yl]-4-hydroxy-2-pyrrolidinyl)methyl ester
gatgctgcagcggatagacgt

SEQ ID NO: 205 - RNA, 21 nt, synthetic construct
  source 1..21: mol_type = other RNA
  modified_base 1: mod_base = OTHER; note = 2'-O-methyladenosine-3'-phosphorothioate
  modified_base 2: mod_base = OTHER; note = 2'-O-methyladenosine-3'-phosphorothioate
  modified_base 3: mod_base = OTHER; note = 2'-O-methyluridine-3'-phosphate
  modified_base 4: mod_base = OTHER; note = 2'-O-methylcytidine-3'-phosphate
  modified_base 5: mod_base = OTHER; note = 2'-O-methyluridine-3'-phosphate
  modified_base 6: mod_base = OTHER; note = 2'-O-methylguanosine-3'-phosphate
  modified_base 7: mod_base = OTHER; note = 2'-deoxy-2'-fluorocytidine-3'-phosphate
  modified_base 8: mod_base = OTHER; note = 2'-O-methylcytidine-3'-phosphate
  modified_base 9: mod_base = OTHER; note = 2'-deoxy-2'-fluoroadenosine-3'-phosphate
  modified_base 10: mod_base = OTHER; note = 2'-deoxy-2'-fluorouridine-3'-phosphate
  modified_base 11: mod_base = OTHER; note = 2'-deoxy-2'-fluorouridine-3'-phosphate
  modified_base 12: mod_base = OTHER; note = 2'-O-methyluridine-3'-phosphate
  modified_base 13: mod_base = OTHER; note = 2'-O-methyladenosine-3'-phosphate
  modified_base 14: mod_base = OTHER; note = 2'-O-methyladenosine-3'-phosphate
  modified_base 15: mod_base = OTHER; note = 2'-O-methyluridine-3'-phosphate
  modified_base 16: mod_base = OTHER; note = 2'-O-methyluridine-3'-phosphate
  modified_base 17: mod_base = OTHER; note = 2'-O-methyladenosine-3'-phosphate
  modified_base 18: mod_base = OTHER; note = 2'-O-methylguanosine-3'-phosphate
  modified_base 19: mod_base = OTHER; note = 2'-O-methylcytidine-3'-phosphate
  modified_base 20: mod_base = OTHER; note = 2'-O-methyluridine-3'-phosphate
  modified_base 21: mod_base = OTHER; note = 2'-O-methyluridine-3'-phosphate ((2S,4R)-1-[29-[[2-(acetylamino)-2-deoxy-beta-D-galactopyra nosyl]oxy]-14,14-bis[[3-[[3-[[5-[[2-(acetylamino)-2-deoxy-b eta-D-galactopyranosyl]oxy]-1-oxopentyl]amino]propyl]amino] -3-oxopropoxy]methyl]-1,12,19,25-tetraoxo-16-oxa-13,20,24-t riazanonacos-1-yl]-4-hydroxy-2-pyrrolidinyl)methyl ester
aatctgccatttaattagctt

SEQ ID NO: 206 - RNA, 21 nt, synthetic construct
  source 1..21: mol_type = other RNA
  modified_base 1: mod_base = OTHER; note = 2'-O-methylguanosine-3'-phosphorothioate
  modified_base 2: mod_base = OTHER; note = 2'-O-methylcytidine-3'-phosphorothioate
  modified_base 3: mod_base = OTHER; note = 2'-O-methyladenosine-3'-phosphate
  modified_base 4: mod_base = OTHER; note = 2'-O-methyluridine-3'-phosphate
  modified_base 5: mod_base = OTHER; note = 2'-O-methyluridine-3'-phosphate
  modified_base 6: mod_base = OTHER; note = 2'-O-methylcytidine-3'-phosphate
  modified_base 7: mod_base = OTHER; note = 2'-deoxy-2'-fluorouridine-3'-phosphate
  modified_base 8: mod_base = OTHER; note = 2'-O-methylcytidine-3'-phosphate
  modified_base 9: mod_base = OTHER; note = 2'-deoxy-2'-fluoroguanosine-3'-phosphate
  modified_base 10: mod_base = OTHER; note = 2'-deoxy-2'-fluoroadenosine-3'-phosphate
  modified_base 11: mod_base = OTHER; note = 2'-deoxy-2'-fluoroguanosine-3'-phosphate
  modified_base 12: mod_base = OTHER; note = 2'-O-methyladenosine-3'-phosphate
  modified_base 13: mod_base = OTHER; note = 2'-O-methyluridine-3'-phosphate
  modified_base 14: mod_base = OTHER; note = 2'-O-methylcytidine-3'-phosphate
  modified_base 15: mod_base = OTHER; note = 2'-O-methylguanosine-3'-phosphate
  modified_base 16: mod_base = OTHER; note = 2'-O-methylcytidine-3'-phosphate
  modified_base 17: mod_base = OTHER; note = 2'-O-methyluridine-3'-phosphate
  modified_base 18: mod_base = OTHER; note = 2'-O-methyluridine-3'-phosphate
  modified_base 19: mod_base = OTHER; note = 2'-O-methyladenosine-3'-phosphate
  modified_base 20: mod_base = OTHER; note = 2'-O-methylguanosine-3'-phosphate
  modified_base 21: mod_base = OTHER; note = 2'-O-methyluridine-3'-phosphate ((2S,4R)-1-[29-[[2-(acetylamino)-2-deoxy-beta-D-galactopyra nosyl]oxy]-14,14-bis[[3-[[3-[[5-[[2-(acetylamino)-2-deoxy-b eta-D-galactopyranosyl]oxy]-1-oxopentyl]amino]propyl]amino] -3-oxopropoxy]methyl]-1,12,19,25-tetraoxo-16-oxa-13,20,24-t riazanonacos-1-yl]-4-hydroxy-2-pyrrolidinyl)methyl ester
gcattctcgagatcgcttagt

SEQ ID NO: 207 - RNA, 21 nt, synthetic construct
  source 1..21: mol_type = other RNA
  modified_base 1: mod_base = OTHER; note = 2'-O-methyluridine-3'-phosphorothioate
  modified_base 2: mod_base = OTHER; note = 2'-O-methyluridine-3'-phosphorothioate
  modified_base 3: mod_base = OTHER; note = 2'-O-methylguanosine-3'-phosphate
  modified_base 4: mod_base = OTHER; note = 2'-O-methyluridine-3'-phosphate
  modified_base 5: mod_base = OTHER; note = 2'-O-methyladenosine-3'-phosphate
  modified_base 6: mod_base = OTHER; note = 2'-O-methyluridine-3'-phosphate
  modified_base 7: mod_base = OTHER; note = 2'-deoxy-2'-fluoroguanosine-3'-phosphate
  modified_base 8: mod_base = OTHER; note = 2'-O-methylguanosine-3'-phosphate
  modified_base 9: mod_base = OTHER; note = 2'-deoxy-2'-fluorouridine-3'-phosphate
  modified_base 10: mod_base = OTHER; note = 2'-deoxy-2'-fluorocytidine-3'-phosphate
  modified_base 11: mod_base = OTHER; note = 2'-deoxy-2'-fluoroguanosine-3'-phosphate
  modified_base 12: mod_base = OTHER; note = 2'-O-methyluridine-3'-phosphate
  modified_base 13: mod_base = OTHER; note = 2'-O-methylguanosine-3'-phosphate
  modified_base 14: mod_base = OTHER; note = 2'-O-methyluridine-3'-phosphate
  modified_base 15: mod_base = OTHER; note = 2'-O-methylguanosine-3'-phosphate
  modified_base 16: mod_base = OTHER; note = 2'-O-methyladenosine-3'-phosphate
  modified_base 17: mod_base = OTHER; note = 2'-O-methylguanosine-3'-phosphate
  modified_base 18: mod_base = OTHER; note = 2'-O-methylguanosine-3'-phosphate
  modified_base 19: mod_base = OTHER; note = 2'-O-methyladenosine-3'-phosphate
  modified_base 20: mod_base = OTHER; note = 2'-O-methyladenosine-3'-phosphate
  modified_base 21: mod_base = OTHER; note = 2'-O-methyladenosine-3'-phosphate ((2S,4R)-1-[29-[[2-(acetylamino)-2-deoxy-beta-D-galactopyra nosyl]oxy]-14,14-bis[[3-[[3-[[5-[[2-(acetylamino)-2-deoxy-b eta-D-galactopyranosyl]oxy]-1-oxopentyl]amino]propyl]amino] -3-oxopropoxy]methyl]-1,12,19,25-tetraoxo-16-oxa-13,20,24-t riazanonacos-1-yl]-4-hydroxy-2-pyrrolidinyl)methyl ester
ttgtatggtcgtgtgaggaaa

SEQ ID NO: 208 - RNA, 21 nt, synthetic construct
  source 1..21: mol_type = other RNA
  modified_base 1: mod_base = OTHER; note = 2'-O-methyluridine-3'-phosphorothioate
  modified_base 2: mod_base = OTHER; note = 2'-O-methylguanosine-3'-phosphorothioate
  modified_base 3: mod_base = OTHER; note = 2'-O-methyladenosine-3'-phosphate
  modified_base 4: mod_base = OTHER; note = 2'-O-methyladenosine-3'-phosphate
  modified_base 5: mod_base = OTHER; note = 2'-O-methylguanosine-3'-phosphate
  modified_base 6: mod_base = OTHER; note = 2'-O-methyladenosine-3'-phosphate
  modified_base 7: mod_base = OTHER; note = 2'-deoxy-2'-fluorouridine-3'-phosphate
  modified_base 8: mod_base = OTHER; note = 2'-O-methylguanosine-3'-phosphate
  modified_base 9: mod_base = OTHER; note = 2'-deoxy-2'-fluorocytidine-3'-phosphate
  modified_base 10: mod_base = OTHER; note = 2'-deoxy-2'-fluorouridine-3'-phosphate
  modified_base 11: mod_base = OTHER; note = 2'-deoxy-2'-fluoroguanosine-3'-phosphate
  modified_base 12: mod_base = OTHER; note = 2'-O-methylcytidine-3'-phosphate
  modified_base 13: mod_base = OTHER; note = 2'-O-methyladenosine-3'-phosphate
  modified_base 14: mod_base = OTHER; note = 2'-O-methylguanosine-3'-phosphate
  modified_base 15: mod_base = OTHER; note = 2'-O-methylcytidine-3'-phosphate
  modified_base 16: mod_base = OTHER; note = 2'-O-methylguanosine-3'-phosphate
  modified_base 17: mod_base = OTHER; note = 2'-O-methylguanosine-3'-phosphate
  modified_base 18: mod_base = OTHER; note = 2'-O-methyladenosine-3'-phosphate
  modified_base 19: mod_base = OTHER; note = 2'-O-methyluridine-3'-phosphate
  modified_base 20: mod_base = OTHER; note = 2'-O-methyladenosine-3'-phosphate
  modified_base 21: mod_base = OTHER; note = 2'-O-methyluridine-3'-phosphate ((2S,4R)-1-[29-[[2-(acetylamino)-2-deoxy-beta-D-galactopyra nosyl]oxy]-14,14-bis[[3-[[3-[[5-[[2-(acetylamino)-2-deoxy-b eta-D-galactopyranosyl]oxy]-1-oxopentyl]amino]propyl]amino] -3-oxopropoxy]methyl]-1,12,19,25-tetraoxo-16-oxa-13,20,24-t riazanonacos-1-yl]-4-hydroxy-2-pyrrolidinyl)methyl ester
tgaagatgctgcagcggatat

SEQ ID NO: 209 - RNA, 21 nt, synthetic construct
  source 1..21: mol_type = other RNA
  modified_base 1: mod_base = OTHER; note = 2'-O-methylcytidine-3'-phosphorothioate
  modified_base 2: mod_base = OTHER; note = 2'-O-methyluridine-3'-phosphorothioate
  modified_base 3: mod_base = OTHER; note = 2'-O-methylguanosine-3'-phosphate
  modified_base 4: mod_base = OTHER; note = 2'-O-methylcytidine-3'-phosphate
  modified_base 5: mod_base = OTHER; note = 2'-O-methyladenosine-3'-phosphate
  modified_base 6: mod_base = OTHER; note = 2'-O-methylguanosine-3'-phosphate
  modified_base 7: mod_base = OTHER; note = 2'-deoxy-2'-fluoroguanosine-3'-phosphate
  modified_base 8: mod_base = OTHER; note = 2'-O-methylguanosine-3'-phosphate
  modified_base 9: mod_base = OTHER; note = 2'-deoxy-2'-fluorocytidine-3'-phosphate
  modified_base 10: mod_base = OTHER; note = 2'-deoxy-2'-fluorouridine-3'-phosphate
  modified_base 11: mod_base = OTHER; note = 2'-deoxy-2'-fluorouridine-3'-phosphate
  modified_base 12: mod_base = OTHER; note = 2'-O-methyluridine-3'-phosphate
  modified_base 13: mod_base = OTHER; note = 2'-O-methylguanosine-3'-phosphate
  modified_base 14: mod_base = OTHER; note = 2'-O-methyladenosine-3'-phosphate
  modified_base 15: mod_base = OTHER; note = 2'-O-methyluridine-3'-phosphate
  modified_base 16: mod_base = OTHER; note = 2'-O-methylguanosine-3'-phosphate
  modified_base 17: mod_base = OTHER; note = 2'-O-methylguanosine-3'-phosphate
  modified_base 18: mod_base = OTHER; note = 2'-O-methylcytidine-3'-phosphate
  modified_base 19: mod_base = OTHER; note = 2'-O-methyladenosine-3'-phosphate
  modified_base 20: mod_base = OTHER; note = 2'-O-methyluridine-3'-phosphate
  modified_base 21: mod_base = OTHER; note = 2'-O-methyluridine-3'-phosphate ((2S,4R)-1-[29-[[2-(acetylamino)-2-deoxy-beta-D-galactopyra nosyl]oxy]-14,14-bis[[3-[[3-[[5-[[2-(acetylamino)-2-deoxy-b eta-D-galactopyranosyl]oxy]-1-oxopentyl]amino]propyl]amino] -3-oxopropoxy]methyl]-1,12,19,25-tetraoxo-16-oxa-13,20,24-t riazanonacos-1-yl]-4-hydroxy-2-pyrrolidinyl)methyl ester
ctgcagggctttgatggcatt

SEQ ID NO: 210 - RNA, 21 nt, synthetic construct
  source 1..21: mol_type = other RNA
  modified_base 1: mod_base = OTHER; note = 2'-O-methyluridine-3'-phosphorothioate
  modified_base 2: mod_base = OTHER; note = 2'-O-methylguanosine-3'-phosphorothioate
  modified_base 3: mod_base = OTHER; note = 2'-O-methylguanosine-3'-phosphate
  modified_base 4: mod_base = OTHER; note = 2'-O-methylcytidine-3'-phosphate
  modified_base 5: mod_base = OTHER; note = 2'-O-methyluridine-3'-phosphate
  modified_base 6: mod_base = OTHER; note = 2'-O-methyladenosine-3'-phosphate
  modified_base 7: mod_base = OTHER; note = 2'-deoxy-2'-fluorocytidine-3'-phosphate
  modified_base 8: mod_base = OTHER; note = 2'-O-methylguanosine-3'-phosphate
  modified_base 9: mod_base = OTHER; note = 2'-deoxy-2'-fluoroguanosine-3'-phosphate
  modified_base 10: mod_base = OTHER; note = 2'-deoxy-2'-fluoroadenosine-3'-phosphate
  modified_base 11: mod_base = OTHER; note = 2'-deoxy-2'-fluoroguanosine-3'-phosphate
  modified_base 12: mod_base = OTHER; note = 2'-O-methyladenosine-3'-phosphate
  modified_base 13: mod_base = OTHER; note = 2'-O-methylcytidine-3'-phosphate
  modified_base 14: mod_base = OTHER; note = 2'-O-methylguanosine-3'-phosphate
  modified_base 15: mod_base = OTHER; note = 2'-O-methyluridine-3'-phosphate
  modified_base 16: mod_base = OTHER; note = 2'-O-methylguanosine-3'-phosphate
  modified_base 17: mod_base = OTHER; note = 2'-O-methylguanosine-3'-phosphate
  modified_base 18: mod_base = OTHER; note = 2'-O-methyluridine-3'-phosphate
  modified_base 19: mod_base = OTHER; note = 2'-O-methylguanosine-3'-phosphate
  modified_base 20: mod_base = OTHER; note = 2'-O-methyluridine-3'-phosphate
  modified_base 21: mod_base = OTHER; note = 2'-O-methyluridine-3'-phosphate ((2S,4R)-1-[29-[[2-(acetylamino)-2-deoxy-beta-D-galactopyra nosyl]oxy]-14,14-bis[[3-[[3-[[5-[[2-(acetylamino)-2-deoxy-b eta-D-galactopyranosyl]oxy]-1-oxopentyl]amino]propyl]amino] -3-oxopropoxy]methyl]-1,12,19,25-tetraoxo-16-oxa-13,20,24-t riazanonacos-1-yl]-4-hydroxy-2-pyrrolidinyl)methyl ester
tggctacggagacgtggtgtt

SEQ ID NO: 211 - RNA, 21 nt, synthetic construct
  source 1..21: mol_type = other RNA
  modified_base 1: mod_base = OTHER; note = 2'-O-methylguanosine-3'-phosphorothioate
  modified_base 2: mod_base = OTHER; note = 2'-O-methyladenosine-3'-phosphorothioate
  modified_base 3: mod_base = OTHER; note = 2'-O-methyladenosine-3'-phosphate
  modified_base 4: mod_base = OTHER; note = 2'-O-methylguanosine-3'-phosphate
  modified_base 5: mod_base = OTHER; note = 2'-O-methyladenosine-3'-phosphate
  modified_base 6: mod_base = OTHER; note = 2'-O-methyluridine-3'-phosphate
  modified_base 7: mod_base = OTHER; note = 2'-deoxy-2'-fluoroguanosine-3'-phosphate
  modified_base 8: mod_base = OTHER; note = 2'-O-methylcytidine-3'-phosphate
  modified_base 9: mod_base = OTHER; note = 2'-deoxy-2'-fluorouridine-3'-phosphate
  modified_base 10: mod_base = OTHER; note = 2'-deoxy-2'-fluoroguanosine-3'-phosphate
  modified_base 11: mod_base = OTHER; note = 2'-deoxy-2'-fluorocytidine-3'-phosphate
  modified_base 12: mod_base = OTHER; note = 2'-O-methyladenosine-3'-phosphate
  modified_base 13: mod_base = OTHER; note = 2'-O-methylguanosine-3'-phosphate
  modified_base 14: mod_base = OTHER; note = 2'-O-methylcytidine-3'-phosphate
  modified_base 15: mod_base = OTHER; note = 2'-O-methylguanosine-3'-phosphate
  modified_base 16: mod_base = OTHER; note = 2'-O-methylguanosine-3'-phosphate
  modified_base 17: mod_base = OTHER; note = 2'-O-methyladenosine-3'-phosphate
  modified_base 18: mod_base = OTHER; note = 2'-O-methyluridine-3'-phosphate
  modified_base 19: mod_base = OTHER; note = 2'-O-methyladenosine-3'-phosphate
  modified_base 20: mod_base = OTHER; note = 2'-O-methylguanosine-3'-phosphate
  modified_base 21: mod_base = OTHER; note = 2'-O-methyladenosine-3'-phosphate ((2S,4R)-1-[29-[[2-(acetylamino)-2-deoxy-beta-D-galactopyra nosyl]oxy]-14,14-bis[[3-[[3-[[5-[[2-(acetylamino)-2-deoxy-b eta-D-galactopyranosyl]oxy]-1-oxopentyl]amino]propyl]amino] -3-oxopropoxy]methyl]-1,12,19,25-tetraoxo-16-oxa-13,20,24-t riazanonacos-1-yl]-4-hydroxy-2-pyrrolidinyl)methyl ester
gaagatgctgcagcggataga

SEQ ID NO: 212 - RNA, 21 nt, synthetic construct
  source 1..21: mol_type = other RNA
  modified_base 1: mod_base = OTHER; note = 2'-O-methyladenosine-3'-phosphorothioate
  modified_base 2: mod_base = OTHER; note = 2'-O-methylguanosine-3'-phosphorothioate
  modified_base 3: mod_base = OTHER; note = 2'-O-methylcytidine-3'-phosphate
  modified_base 4: mod_base = OTHER; note = 2'-O-methyluridine-3'-phosphate
  modified_base 5: mod_base = OTHER; note = 2'-O-methylguanosine-3'-phosphate
  modified_base 6: mod_base = OTHER; note = 2'-O-methylguanosine-3'-phosphate
  modified_base 7: mod_base = OTHER; note = 2'-deoxy-2'-fluoroadenosine-3'-phosphate
  modified_base 8: mod_base = OTHER; note = 2'-O-methylguanosine-3'-phosphate
  modified_base 9: mod_base = OTHER; note = 2'-deoxy-2'-fluoroadenosine-3'-phosphate
  modified_base 10: mod_base = OTHER; note = 2'-deoxy-2'-fluorocytidine-3'-phosphate
  modified_base 11: mod_base = OTHER; note = 2'-deoxy-2'-fluoroadenosine-3'-phosphate
  modified_base 12: mod_base = OTHER; note = 2'-O-methylcytidine-3'-phosphate
  modified_base 13: mod_base = OTHER; note = 2'-O-methylcytidine-3'-phosphate
  modified_base 14: mod_base = OTHER; note = 2'-O-methyluridine-3'-phosphate
  modified_base 15: mod_base = OTHER; note = 2'-O-methyluridine-3'-phosphate
  modified_base 16: mod_base = OTHER; note = 2'-O-methylcytidine-3'-phosphate
  modified_base 17: mod_base = OTHER; note = 2'-O-methyladenosine-3'-phosphate
  modified_base 18: mod_base = OTHER; note = 2'-O-methyladenosine-3'-phosphate
  modified_base 19: mod_base = OTHER; note = 2'-O-methyluridine-3'-phosphate
  modified_base 20: mod_base = OTHER; note = 2'-O-methylguanosine-3'-phosphate
  modified_base 21: mod_base = OTHER; note = 2'-O-methyluridine-3'-phosphate ((2S,4R)-1-[29-[[2-(acetylamino)-2-deoxy-beta-D-galactopyra nosyl]oxy]-14,14-bis[[3-[[3-[[5-[[2-(acetylamino)-2-deoxy-b eta-D-galactopyranosyl]oxy]-1-oxopentyl]amino]propyl]amino] -3-oxopropoxy]methyl]-1,12,19,25-tetraoxo-16-oxa-13,20,24-t riazanonacos-1-yl]-4-hydroxy-2-pyrrolidinyl)methyl ester
agctggagacaccttcaatgt

SEQ ID NO: 213 - RNA, 21 nt, synthetic construct
  source 1..21: mol_type = other RNA
  modified_base 1: mod_base = OTHER; note = 2'-O-methyluridine-3'-phosphorothioate
  modified_base 2: mod_base = OTHER; note = 2'-O-methylguanosine-3'-phosphorothioate
  modified_base 3: mod_base = OTHER; note = 2'-O-methyluridine-3'-phosphate
  modified_base 4: mod_base = OTHER; note = 2'-O-methyluridine-3'-phosphate
  modified_base 5: mod_base = OTHER; note = 2'-O-methyluridine-3'-phosphate
  modified_base 6: mod_base = OTHER; note = 2'-O-methylguanosine-3'-phosphate
  modified_base 7: mod_base = OTHER; note = 2'-deoxy-2'-fluoroguanosine-3'-phosphate
  modified_base 8: mod_base = OTHER; note = 2'-O-methylcytidine-3'-phosphate
  modified_base 9: mod_base = OTHER; note = 2'-deoxy-2'-fluorouridine-3'-phosphate
  modified_base 10: mod_base = OTHER; note = 2'-deoxy-2'-fluoroadenosine-3'-phosphate
  modified_base 11: mod_base = OTHER; note = 2'-deoxy-2'-fluorocytidine-3'-phosphate
  modified_base 12: mod_base = OTHER; note = 2'-O-methylguanosine-3'-phosphate
  modified_base 13: mod_base = OTHER; note = 2'-O-methylguanosine-3'-phosphate
  modified_base 14: mod_base = OTHER; note = 2'-O-methyladenosine-3'-phosphate
  modified_base 15: mod_base = OTHER; note = 2'-O-methylguanosine-3'-phosphate
  modified_base 16: mod_base = OTHER; note = 2'-O-methyladenosine-3'-phosphate
  modified_base 17: mod_base = OTHER; note = 2'-O-methylcytidine-3'-phosphate
  modified_base 18: mod_base = OTHER; note = 2'-O-methylguanosine-3'-phosphate
  modified_base 19: mod_base = OTHER; note = 2'-O-methyluridine-3'-phosphate
  modified_base 20: mod_base = OTHER; note = 2'-O-methylguanosine-3'-phosphate
  modified_base 21: mod_base = OTHER; note = 2'-O-methyluridine-3'-phosphate ((2S,4R)-1-[29-[[2-(acetylamino)-2-deoxy-beta-D-galactopyra nosyl]oxy]-14,14-bis[[3-[[3-[[5-[[2-(acetylamino)-2-deoxy-b eta-D-galactopyranosyl]oxy]-1-oxopentyl]amino]propyl]amino] -3-oxopropoxy]methyl]-1,12,19,25-tetraoxo-16-oxa-13,20,24-t riazanonacos-1-yl]-4-hydroxy-2-pyrrolidinyl)methyl ester
tgtttggctacggagacgtgt

SEQ ID NO: 214 - RNA, 21 nt, synthetic construct
  source 1..21: mol_type = other RNA
  modified_base 1: mod_base = OTHER; note = 2'-O-methyluridine-3'-phosphorothioate
  modified_base 2: mod_base = OTHER; note = 2'-O-methylguanosine-3'-phosphorothioate
  modified_base 3: mod_base = OTHER; note = 2'-O-methylcytidine-3'-phosphate
  modified_base 4: mod_base = OTHER; note = 2'-O-methyladenosine-3'-phosphate
  modified_base 5: mod_base = OTHER; note = 2'-O-methyluridine-3'-phosphate
  modified_base 6: mod_base = OTHER; note = 2'-O-methyluridine-3'-phosphate
  modified_base 7: mod_base = OTHER; note = 2'-deoxy-2'-fluorocytidine-3'-phosphate
  modified_base 8: mod_base = OTHER; note = 2'-O-methyluridine-3'-phosphate
  modified_base 9: mod_base = OTHER; note = 2'-deoxy-2'-fluorocytidine-3'-phosphate
  modified_base 10: mod_base = OTHER; note = 2'-deoxy-2'-fluoroguanosine-3'-phosphate
  modified_base 11: mod_base = OTHER; note = 2'-deoxy-2'-fluoroadenosine-3'-phosphate
  modified_base 12: mod_base = OTHER; note = 2'-O-methylguanosine-3'-phosphate
  modified_base 13: mod_base = OTHER; note = 2'-O-methyladenosine-3'-phosphate
  modified_base 14: mod_base = OTHER; note = 2'-O-methyluridine-3'-phosphate
  modified_base 15: mod_base = OTHER; note = 2'-O-methylcytidine-3'-phosphate
  modified_base 16: mod_base = OTHER; note = 2'-O-methylguanosine-3'-phosphate
  modified_base 17: mod_base = OTHER; note = 2'-O-methylcytidine-3'-phosphate
  modified_base 18: mod_base = OTHER; note = 2'-O-methyluridine-3'-phosphate
  modified_base 19: mod_base = OTHER; note = 2'-O-methyluridine-3'-phosphate
  modified_base 20: mod_base = OTHER; note = 2'-O-methyladenosine-3'-phosphate
  modified_base 21: mod_base = OTHER; note = 2'-O-methyluridine-3'-phosphate ((2S,4R)-1-[29-[[2-(acetylamino)-2-deoxy-beta-D-galactopyra nosyl]oxy]-14,14-bis[[3-[[3-[[5-[[2-(acetylamino)-2-deoxy-b eta-D-galactopyranosyl]oxy]-1-oxopentyl]amino]propyl]amino] -3-oxopropoxy]methyl]-1,12,19,25-tetraoxo-16-oxa-13,20,24-t riazanonacos-1-yl]-4-hydroxy-2-pyrrolidinyl)methyl ester
tgcattctcgagatcgcttat

SEQ ID NO: 215 - RNA, 21 nt, synthetic construct
  source 1..21: mol_type = other RNA
  modified_base 1: mod_base = OTHER; note = 2'-O-methylguanosine-3'-phosphorothioate
  modified_base 2: mod_base = OTHER; note = 2'-O-methyladenosine-3'-phosphorothioate
  modified_base 3: mod_base = OTHER; note = 2'-O-methyluridine-3'-phosphate
  modified_base 4: mod_base = OTHER; note = 2'-O-methylcytidine-3'-phosphate
  modified_base 5: mod_base = OTHER; note = 2'-O-methylguanosine-3'-phosphate
  modified_base 6: mod_base = OTHER; note = 2'-O-methylcytidine-3'-phosphate
  modified_base 7: mod_base = OTHER; note = 2'-deoxy-2'-fluorouridine-3'-phosphate
  modified_base 8: mod_base = OTHER; note = 2'-O-methyluridine-3'-phosphate
  modified_base 9: mod_base = OTHER; note = 2'-deoxy-2'-fluoroadenosine-3'-phosphate
  modified_base 10: mod_base = OTHER; note = 2'-deoxy-2'-fluoroguanosine-3'-phosphate
  modified_base 11: mod_base = OTHER; note = 2'-deoxy-2'-fluorocytidine-3'-phosphate
  modified_base 12: mod_base = OTHER; note = 2'-O-methylcytidine-3'-phosphate
  modified_base 13: mod_base = OTHER; note = 2'-O-methylguanosine-3'-phosphate
  modified_base 14: mod_base = OTHER; note = 2'-O-methylcytidine-3'-phosphate
  modified_base 15: mod_base = OTHER; note = 2'-O-methylguanosine-3'-phosphate
  modified_base 16: mod_base = OTHER; note = 2'-O-methylcytidine-3'-phosphate
  modified_base 17: mod_base = OTHER; note = 2'-O-methyluridine-3'-phosphate
  modified_base 18: mod_base = OTHER; note = 2'-O-methyluridine-3'-phosphate
  modified_base 19: mod_base = OTHER; note = 2'-O-methyluridine-3'-phosphate
  modified_base 20: mod_base = OTHER; note = 2'-O-methyladenosine-3'-phosphate
  modified_base 21: mod_base = OTHER; note = 2'-O-methyladenosine-3'-phosphate ((2S,4R)-1-[29-[[2-(acetylamino)-2-deoxy-beta-D-galactopyra nosyl]oxy]-14,14-bis[[3-[[3-[[5-[[2-(acetylamino)-2-deoxy-b eta-D-galactopyranosyl]oxy]-1-oxopentyl]amino]propyl]amino] -3-oxopropoxy]methyl]-1,12,19,25-tetraoxo-16-oxa-13,20,24-t riazanonacos-1-yl]-4-hydroxy-2-pyrrolidinyl)methyl ester
gatcgcttagccgcgctttaa

SEQ ID NO: 216 - RNA, 21 nt, synthetic construct
  source 1..21: mol_type = other RNA
  modified_base 1: mod_base = OTHER; note = 2'-O-methylguanosine-3'-phosphorothioate
  modified_base 2: mod_base = OTHER; note = 2'-O-methylcytidine-3'-phosphorothioate
  modified_base 3: mod_base = OTHER; note = 2'-O-methylcytidine-3'-phosphate
  modified_base 4: mod_base = OTHER; note = 2'-O-methylcytidine-3'-phosphate
  modified_base 5: mod_base = OTHER; note = 2'-O-methyladenosine-3'-phosphate
  modified_base 6: mod_base = OTHER; note = 2'-O-methylcytidine-3'-phosphate
  modified_base 7: mod_base = OTHER; note = 2'-deoxy-2'-fluorocytidine-3'-phosphate
  modified_base 8: mod_base = OTHER; note = 2'-O-methyladenosine-3'-phosphate
  modified_base 9: mod_base = OTHER; note = 2'-deoxy-2'-fluoroguanosine-3'-phosphate
  modified_base 10: mod_base = OTHER; note = 2'-deoxy-2'-fluorocytidine-3'-phosphate
  modified_base 11: mod_base = OTHER; note = 2'-deoxy-2'-fluorocytidine-3'-phosphate
  modified_base 12: mod_base = OTHER; note = 2'-O-methyluridine-3'-phosphate
  modified_base 13: mod_base = OTHER; note = 2'-O-methylguanosine-3'-phosphate
  modified_base 14: mod_base = OTHER; note = 2'-O-methyluridine-3'-phosphate
  modified_base 15: mod_base = OTHER; note = 2'-O-methylguanosine-3'-phosphate
  modified_base 16: mod_base = OTHER; note = 2'-O-methyladenosine-3'-phosphate
  modified_base 17: mod_base = OTHER; note = 2'-O-methyluridine-3'-phosphate
  modified_base 18: mod_base = OTHER; note = 2'-O-methyluridine-3'-phosphate
  modified_base 19: mod_base = OTHER; note = 2'-O-methyluridine-3'-phosphate
  modified_base 20: mod_base = OTHER; note = 2'-O-methylguanosine-3'-phosphate
  modified_base 21: mod_base = OTHER; note = 2'-O-methyladenosine-3'-phosphate ((2S,4R)-1-[29-[[2-(acetylamino)-2-deoxy-beta-D-galactopyra nosyl]oxy]-14,14-bis[[3-[[3-[[5-[[2-(acetylamino)-2-deoxy-b eta-D-galactopyranosyl]oxy]-1-oxopentyl]amino]propyl]amino] -3-oxopropoxy]methyl]-1,12,19,25-tetraoxo-16-oxa-13,20,24-t riazanonacos-1-yl]-4-hydroxy-2-pyrrolidinyl)methyl ester
gcccaccagcctgtgatttga

SEQ ID NO: 217 - RNA, 21 nt, synthetic construct
  source 1..21: mol_type = other RNA
  modified_base 1: mod_base = OTHER; note = 2'-O-methyladenosine-3'-phosphorothioate
  modified_base 2: mod_base = OTHER; note = 2'-O-methylguanosine-3'-phosphorothioate
  modified_base 3: mod_base = OTHER; note = 2'-O-methyladenosine-3'-phosphate
  modified_base 4: mod_base = OTHER; note = 2'-O-methylcytidine-3'-phosphate
  modified_base 5: mod_base = OTHER; note = 2'-O-methylguanosine-3'-phosphate
  modified_base 6: mod_base = OTHER; note = 2'-O-methyluridine-3'-phosphate
  modified_base 7: mod_base = OTHER; note = 2'-deoxy-2'-fluoroguanosine-3'-phosphate
  modified_base 8: mod_base = OTHER; note = 2'-O-methylguanosine-3'-phosphate
  modified_base 9: mod_base = OTHER; note = 2'-deoxy-2'-fluorouridine-3'-phosphate
  modified_base 10: mod_base = OTHER; note = 2'-deoxy-2'-fluoroguanosine-3'-phosphate
  modified_base 11: mod_base = OTHER; note = 2'-deoxy-2'-fluorouridine-3'-phosphate
  modified_base 12: mod_base = OTHER; note = 2'-O-methyluridine-3'-phosphate
  modified_base 13: mod_base = OTHER; note = 2'-O-methyluridine-3'-phosphate
  modified_base 14: mod_base = OTHER; note = 2'-O-methylguanosine-3'-phosphate
  modified_base 15: mod_base = OTHER; note = 2'-O-methyluridine-3'-phosphate
  modified_base 16: mod_base = OTHER; note = 2'-O-methylcytidine-3'-phosphate
  modified_base 17: mod_base = OTHER; note = 2'-O-methyladenosine-3'-phosphate
  modified_base 18: mod_base = OTHER; note = 2'-O-methylguanosine-3'-phosphate
  modified_base 19: mod_base = OTHER; note = 2'-O-methylcytidine-3'-phosphate
  modified_base 20: mod_base = OTHER; note = 2'-O-methyladenosine-3'-phosphate
  modified_base 21: mod_base = OTHER; note = 2'-O-methyladenosine-3'-phosphate ((2S,4R)-1-[29-[[2-(acetylamino)-2-deoxy-beta-D-galactopyra nosyl]oxy]-14,14-bis[[3-[[3-[[5-[[2-(acetylamino)-2-deoxy-b eta-D-galactopyranosyl]oxy]-1-oxopentyl]amino]propyl]amino] -3-oxopropoxy]methyl]-1,12,19,25-tetraoxo-16-oxa-13,20,24-t riazanonacos-1-yl]-4-hydroxy-2-pyrrolidinyl)methyl ester
agacgtggtgtttgtcagcaa

SEQ ID NO: 218 - RNA, 21 nt, synthetic construct
  source 1..21: mol_type = other RNA
  modified_base 1: mod_base = OTHER; note = 2'-O-methyladenosine-3'-phosphorothioate
  modified_base 2: mod_base = OTHER; note = 2'-O-methylguanosine-3'-phosphorothioate
  modified_base 3: mod_base = OTHER; note = 2'-O-methyladenosine-3'-phosphate
  modified_base 4: mod_base = OTHER; note = 2'-O-methyluridine-3'-phosphate
  modified_base 5: mod_base = OTHER; note = 2'-O-methylguanosine-3'-phosphate
  modified_base 6: mod_base = OTHER; note = 2'-O-methylcytidine-3'-phosphate
  modified_base 7: mod_base = OTHER; note = 2'-deoxy-2'-fluorouridine-3'-phosphate
  modified_base 8: mod_base = OTHER; note = 2'-O-methylguanosine-3'-phosphate
  modified_base 9: mod_base = OTHER; note = 2'-deoxy-2'-fluorocytidine-3'-phosphate
  modified_base 10: mod_base = OTHER; note = 2'-deoxy-2'-fluoroadenosine-3'-phosphate
  modified_base 11: mod_base = OTHER; note = 2'-deoxy-2'-fluoroguanosine-3'-phosphate
  modified_base 12: mod_base = OTHER; note = 2'-O-methylcytidine-3'-phosphate
  modified_base 13: mod_base = OTHER; note = 2'-O-methylguanosine-3'-phosphate
  modified_base 14: mod_base = OTHER; note = 2'-O-methylguanosine-3'-phosphate
  modified_base 15: mod_base = OTHER; note = 2'-O-methyladenosine-3'-phosphate
  modified_base 16: mod_base = OTHER; note = 2'-O-methyluridine-3'-phosphate
  modified_base 17: mod_base = OTHER; note = 2'-O-methyladenosine-3'-phosphate
  modified_base 18: mod_base = OTHER; note = 2'-O-methylguanosine-3'-phosphate
  modified_base 19: mod_base = OTHER; note = 2'-O-methyladenosine-3'-phosphate
  modified_base 20: mod_base = OTHER; note = 2'-O-methylcytidine-3'-phosphate
  modified_base 21: mod_base = OTHER; note = 2'-O-methyluridine-3'-phosphate ((2S,4R)-1-[29-[[2-(acetylamino)-2-deoxy-beta-D-galactopyra nosyl]oxy]-14,14-bis[[3-[[3-[[5-[[2-(acetylamino)-2-deoxy-b eta-D-galactopyranosyl]oxy]-1-oxopentyl]amino]propyl]amino] -3-oxopropoxy]methyl]-1,12,19,25-tetraoxo-16-oxa-13,20,24-t riazanonacos-1-yl]-4-hydroxy-2-pyrrolidinyl)methyl ester
agatgctgcagcggatagact

SEQ ID NO: 219 - RNA, 21 nt, synthetic construct
  source 1..21: mol_type = other RNA
  modified_base 1: mod_base = OTHER; note = 2'-O-methyladenosine-3'-phosphorothioate
  modified_base 2: mod_base = OTHER; note = 2'-O-methylguanosine-3'-phosphorothioate
  modified_base 3: mod_base = OTHER; note = 2'-O-methyladenosine-3'-phosphate
  modified_base 4: mod_base = OTHER; note = 2'-O-methyladenosine-3'-phosphate
  modified_base 5: mod_base = OTHER; note = 2'-O-methylguanosine-3'-phosphate
  modified_base 6: mod_base = OTHER; note = 2'-O-methylcytidine-3'-phosphate
  modified_base 7: mod_base = OTHER; note = 2'-deoxy-2'-fluoroadenosine-3'-phosphate
  modified_base 8: mod_base = OTHER; note = 2'-O-methylguanosine-3'-phosphate
  modified_base 9: mod_base = OTHER; note = 2'-deoxy-2'-fluoroadenosine-3'-phosphate
  modified_base 10: mod_base = OTHER; note = 2'-deoxy-2'-fluorouridine-3'-phosphate
  modified_base 11: mod_base = OTHER; note = 2'-deoxy-2'-fluorocytidine-3'-phosphate
  modified_base 12: mod_base = OTHER; note = 2'-O-methylcytidine-3'-phosphate
  modified_base 13: mod_base = OTHER; note = 2'-O-methyluridine-3'-phosphate
  modified_base 14: mod_base = OTHER; note = 2'-O-methylguanosine-3'-phosphate
  modified_base 15: mod_base = OTHER; note = 2'-O-methyluridine-3'-phosphate
  modified_base 16: mod_base = OTHER; note = 2'-O-methylguanosine-3'-phosphate
  modified_base 17: mod_base = OTHER; note = 2'-O-methylcytidine-3'-phosphate
  modified_base 18: mod_base = OTHER; note = 2'-O-methylguanosine-3'-phosphate
  modified_base 19: mod_base = OTHER; note = 2'-O-methyluridine-3'-phosphate
  modified_base 20: mod_base = OTHER; note = 2'-O-methylguanosine-3'-phosphate
  modified_base 21: mod_base = OTHER; note = 2'-O-methyluridine-3'-phosphate ((2S,4R)-1-[29-[[2-(acetylamino)-2-deoxy-beta-D-galactopyra nosyl]oxy]-14,14-bis[[3-[[3-[[5-[[2-(acetylamino)-2-deoxy-b eta-D-galactopyranosyl]oxy]-1-oxopentyl]amino]propyl]amino] -3-oxopropoxy]methyl]-1,12,19,25-tetraoxo-16-oxa-13,20,24-t riazanonacos-1-yl]-4-hydroxy-2-pyrrolidinyl)methyl ester
agaagcagatcctgtgcgtgt

SEQ ID NO: 220 - RNA, 21 nt, synthetic construct
  source 1..21: mol_type = other RNA
  modified_base 1: mod_base = OTHER; note = 2'-O-methylguanosine-3'-phosphorothioate
  modified_base 2: mod_base = OTHER; note = 2'-O-methylcytidine-3'-phosphorothioate
  modified_base 3: mod_base = OTHER; note = 2'-O-methyluridine-3'-phosphate
  modified_base 4: mod_base = OTHER; note = 2'-O-methyluridine-3'-phosphate
  modified_base 5: mod_base = OTHER; note = 2'-O-methylguanosine-3'-phosphate
  modified_base 6: mod_base = OTHER; note = 2'-O-methyluridine-3'-phosphate
  modified_base 7: mod_base = OTHER; note = 2'-deoxy-2'-fluoroadenosine-3'-phosphate
  modified_base 8: mod_base = OTHER; note = 2'-O-methyluridine-3'-phosphate
  modified_base 9: mod_base = OTHER; note = 2'-deoxy-2'-fluoroguanosine-3'-phosphate
  modified_base 10: mod_base = OTHER; note = 2'-deoxy-2'-fluoroguanosine-3'-phosphate
  modified_base 11: mod_base = OTHER; note = 2'-deoxy-2'-fluorouridine-3'-phosphate
  modified_base 12: mod_base = OTHER; note = 2'-O-methylcytidine-3'-phosphate
  modified_base 13: mod_base = OTHER; note = 2'-O-methylguanosine-3'-phosphate
  modified_base 14: mod_base = OTHER; note = 2'-O-methyluridine-3'-phosphate
  modified_base 15: mod_base = OTHER; note = 2'-O-methylguanosine-3'-phosphate
  modified_base 16: mod_base = OTHER; note = 2'-O-methyluridine-3'-phosphate
  modified_base 17: mod_base = OTHER; note = 2'-O-methylguanosine-3'-phosphate
  modified_base 18: mod_base = OTHER; note = 2'-O-methyladenosine-3'-phosphate
  modified_base 19: mod_base = OTHER; note = 2'-O-methylguanosine-3'-phosphate
  modified_base 20: mod_base = OTHER; note = 2'-O-methylguanosine-3'-phosphate
  modified_base 21: mod_base = OTHER; note = 2'-O-methyladenosine-3'-phosphate ((2S,4R)-1-[29-[[2-(acetylamino)-2-deoxy-beta-D-galactopyra nosyl]oxy]-14,14-bis[[3-[[3-[[5-[[2-(acetylamino)-2-deoxy-b eta-D-galactopyranosyl]oxy]-1-oxopentyl]amino]propyl]amino] -3-oxopropoxy]methyl]-1,12,19,25-tetraoxo-16-oxa-13,20,24-t riazanonacos-1-yl]-4-hydroxy-2-pyrrolidinyl)methyl ester
gcttgtatggtcgtgtgagga

SEQ ID NO: 221 - RNA, 21 nt, synthetic construct
  source 1..21: mol_type = other RNA
  modified_base 1: mod_base = OTHER; note = 2'-O-methyluridine-3'-phosphorothioate
  modified_base 2: mod_base = OTHER; note = 2'-O-methyluridine-3'-phosphorothioate
  modified_base 3: mod_base = OTHER; note = 2'-O-methylcytidine-3'-phosphate
  modified_base 4: mod_base = OTHER; note = 2'-O-methyluridine-3'-phosphate
  modified_base 5: mod_base = OTHER; note = 2'-O-methylcytidine-3'-phosphate
  modified_base 6: mod_base = OTHER; note = 2'-O-methylguanosine-3'-phosphate
  modified_base 7: mod_base = OTHER; note = 2'-deoxy-2'-fluoroadenosine-3'-phosphate
  modified_base 8: mod_base = OTHER; note = 2'-O-methylguanosine-3'-phosphate
  modified_base 9: mod_base = OTHER; note = 2'-deoxy-2'-fluoroadenosine-3'-phosphate
  modified_base 10: mod_base = OTHER; note = 2'-deoxy-2'-fluorouridine-3'-phosphate
  modified_base 11: mod_base = OTHER; note = 2'-deoxy-2'-fluorocytidine-3'-phosphate
  modified_base 12: mod_base = OTHER; note = 2'-O-methylguanosine-3'-phosphate
  modified_base 13: mod_base = OTHER; note = 2'-O-methylcytidine-3'-phosphate
  modified_base 14: mod_base = OTHER; note = 2'-O-methyluridine-3'-phosphate
  modified_base 15: mod_base = OTHER; note = 2'-O-methyluridine-3'-phosphate
  modified_base 16: mod_base = OTHER; note = 2'-O-methyladenosine-3'-phosphate
  modified_base 17: mod_base = OTHER; note = 2'-O-methylguanosine-3'-phosphate
  modified_base 18: mod_base = OTHER; note = 2'-O-methylcytidine-3'-phosphate
  modified_base 19: mod_base = OTHER; note = 2'-O-methylcytidine-3'-phosphate
  modified_base 20: mod_base = OTHER; note = 2'-O-methylguanosine-3'-phosphate
  modified_base 21: mod_base = OTHER; note = 2'-O-methyluridine-3'-phosphate ((2S,4R)-1-[29-[[2-(acetylamino)-2-deoxy-beta-D-galactopyra nosyl]oxy]-14,14-bis[[3-[[3-[[5-[[2-(acetylamino)-2-deoxy-b eta-D-galactopyranosyl]oxy]-1-oxopentyl]amino]propyl]amino] -3-oxopropoxy]methyl]-1,12,19,25-tetraoxo-16-oxa-13,20,24-t riazanonacos-1-yl]-4-hydroxy-2-pyrrolidinyl)methyl ester
ttctcgagatcgcttagccgt

SEQ ID NO: 222 - RNA, 21 nt, synthetic construct
  source 1..21: mol_type = other RNA
  modified_base 1: mod_base = OTHER; note = 2'-O-methyluridine-3'-phosphorothioate
  modified_base 2: mod_base = OTHER; note = 2'-O-methylguanosine-3'-phosphorothioate
  modified_base 3: mod_base = OTHER; note = 2'-O-methyladenosine-3'-phosphate
  modified_base 4: mod_base = OTHER; note = 2'-O-methylguanosine-3'-phosphate
  modified_base 5: mod_base = OTHER; note = 2'-O-methyladenosine-3'-phosphate
  modified_base 6: mod_base = OTHER; note = 2'-O-methyladenosine-3'-phosphate
  modified_base 7: mod_base = OTHER; note = 2'-deoxy-2'-fluoroguanosine-3'-phosphate
  modified_base 8: mod_base = OTHER; note = 2'-O-methylguanosine-3'-phosphate
  modified_base 9: mod_base = OTHER; note = 2'-deoxy-2'-fluorouridine-3'-phosphate
  modified_base 10: mod_base = OTHER; note = 2'-deoxy-2'-fluorouridine-3'-phosphate
  modified_base 11: mod_base = OTHER; note = 2'-deoxy-2'-fluoroguanosine-3'-phosphate
  modified_base 12: mod_base = OTHER; note = 2'-O-methyladenosine-3'-phosphate
  modified_base 13: mod_base = OTHER; note = 2'-O-methyluridine-3'-phosphate
  modified_base 14: mod_base = OTHER; note = 2'-O-methylcytidine-3'-phosphate
  modified_base 15: mod_base = OTHER; note = 2'-O-methyluridine-3'-phosphate
  modified_base 16: mod_base = OTHER; note = 2'-O-methylguanosine-3'-phosphate
  modified_base 17: mod_base = OTHER; note = 2'-O-methyladenosine-3'-phosphate
  modified_base 18: mod_base = OTHER; note = 2'-O-methylcytidine-3'-phosphate
  modified_base 19: mod_base = OTHER; note = 2'-O-methylcytidine-3'-phosphate
  modified_base 20: mod_base = OTHER; note = 2'-O-methylcytidine-3'-phosphate
  modified_base 21: mod_base = OTHER; note = 2'-O-methyladenosine-3'-phosphate ((2S,4R)-1-[29-[[2-(acetylamino)-2-deoxy-beta-D-galactopyra nosyl]oxy]-14,14-bis[[3-[[3-[[5-[[2-(acetylamino)-2-deoxy-b eta-D-galactopyranosyl]oxy]-1-oxopentyl]amino]propyl]amino] -3-oxopropoxy]methyl]-1,12,19,25-tetraoxo-16-oxa-13,20,24-t riazanonacos-1-yl]-4-hydroxy-2-pyrrolidinyl)methyl ester
tgagaaggttgatctgaccca

SEQ ID NO: 223 - RNA, 21 nt, synthetic construct
  source 1..21: mol_type = other RNA
  modified_base 1: mod_base = OTHER; note = 2'-O-methyluridine-3'-phosphorothioate
  modified_base 2: mod_base = OTHER; note = 2'-O-methyluridine-3'-phosphorothioate
  modified_base 3: mod_base = OTHER; note = 2'-O-methylguanosine-3'-phosphate
  modified_base 4: mod_base = OTHER; note = 2'-O-methylcytidine-3'-phosphate
  modified_base 5: mod_base = OTHER; note = 2'-O-methyladenosine-3'-phosphate
  modified_base 6: mod_base = OTHER; note = 2'-O-methyluridine-3'-phosphate
  modified_base 7: mod_base = OTHER; note = 2'-deoxy-2'-fluorouridine-3'-phosphate
  modified_base 8: mod_base = OTHER; note = 2'-O-methylcytidine-3'-phosphate
  modified_base 9: mod_base = OTHER; note = 2'-deoxy-2'-fluorouridine-3'-phosphate
  modified_base 10: mod_base = OTHER; note = 2'-deoxy-2'-fluorocytidine-3'-phosphate
  modified_base 11: mod_base = OTHER; note = 2'-deoxy-2'-fluoroguanosine-3'-phosphate
  modified_base 12: mod_base = OTHER; note = 2'-O-methyladenosine-3'-phosphate
  modified_base 13: mod_base = OTHER; note = 2'-O-methylguanosine-3'-phosphate
  modified_base 14: mod_base = OTHER; note = 2'-O-methyladenosine-3'-phosphate
  modified_base 15: mod_base = OTHER; note = 2'-O-methyluridine-3'-phosphate
  modified_base 16: mod_base = OTHER; note = 2'-O-methylcytidine-3'-phosphate
  modified_base 17: mod_base = OTHER; note = 2'-O-methylguanosine-3'-phosphate
  modified_base 18: mod_base = OTHER; note = 2'-O-methylcytidine-3'-phosphate
  modified_base 19: mod_base = OTHER; note = 2'-O-methyluridine-3'-phosphate
  modified_base 20: mod_base = OTHER; note = 2'-O-methyluridine-3'-phosphate
  modified_base 21: mod_base = OTHER; note = 2'-O-methyladenosine-3'-phosphate ((2S,4R)-1-[29-[[2-(acetylamino)-2-deoxy-beta-D-galactopyra nosyl]oxy]-14,14-bis[[3-[[3-[[5-[[2-(acetylamino)-2-deoxy-b eta-D-galactopyranosyl]oxy]-1-oxopentyl]amino]propyl]amino] -3-oxopropoxy]methyl]-1,12,19,25-tetraoxo-16-oxa-13,20,24-t riazanonacos-1-yl]-4-hydroxy-2-pyrrolidinyl)methyl ester
ttgcattctcgagatcgctta

SEQ ID NO: 224 - RNA, 21 nt, synthetic construct
  source 1..21: mol_type = other RNA
  modified_base 1: mod_base = OTHER; note = 2'-O-methyluridine-3'-phosphorothioate
  modified_base 2: mod_base = OTHER; note = 2'-O-methylguanosine-3'-phosphorothioate
  modified_base 3: mod_base = OTHER; note = 2'-O-methylcytidine-3'-phosphate
  modified_base 4: mod_base = OTHER; note = 2'-O-methylguanosine-3'-phosphate
  modified_base 5: mod_base = OTHER; note = 2'-O-methyluridine-3'-phosphate
  modified_base 6: mod_base = OTHER; note = 2'-O-methyluridine-3'-phosphate
  modified_base 7: mod_base = OTHER; note = 2'-deoxy-2'-fluoroguanosine-3'-phosphate
  modified_base 8: mod_base = OTHER; note = 2'-O-methyluridine-3'-phosphate
  modified_base 9: mod_base = OTHER; note = 2'-deoxy-2'-fluoroguanosine-3'-phosphate
  modified_base 10: mod_base = OTHER; note = 2'-deoxy-2'-fluorocytidine-3'-phosphate
  modified_base 11: mod_base = OTHER; note = 2'-deoxy-2'-fluoroadenosine-3'-phosphate
  modified_base 12: mod_base = OTHER; note = 2'-O-methylguanosine-3'-phosphate
  modified_base 13: mod_base = OTHER; note = 2'-O-methyladenosine-3'-phosphate
  modified_base 14: mod_base = OTHER; note = 2'-O-methylcytidine-3'-phosphate
  modified_base 15: mod_base = OTHER; note = 2'-O-methyluridine-3'-phosphate
  modified_base 16: mod_base = OTHER; note = 2'-O-methylcytidine-3'-phosphate
  modified_base 17: mod_base = OTHER; note = 2'-O-methyluridine-3'-phosphate
  modified_base 18: mod_base = OTHER; note = 2'-O-methyladenosine-3'-phosphate
  modified_base 19: mod_base = OTHER; note = 2'-O-methyluridine-3'-phosphate
  modified_base 20: mod_base = OTHER; note = 2'-O-methyluridine-3'-phosphate
  modified_base 21: mod_base = OTHER; note = 2'-O-methyluridine-3'-phosphate ((2S,4R)-1-[29-[[2-(acetylamino)-2-deoxy-beta-D-galactopyra nosyl]oxy]-14,14-bis[[3-[[3-[[5-[[2-(acetylamino)-2-deoxy-b eta-D-galactopyranosyl]oxy]-1-oxopentyl]amino]propyl]amino] -3-oxopropoxy]methyl]-1,12,19,25-tetraoxo-16-oxa-13,20,24-t riazanonacos-1-yl]-4-hydroxy-2-pyrrolidinyl)methyl ester
tgcgttgtgcagactctattt

SEQ ID NO: 225 - RNA, 21 nt, synthetic construct
  source 1..21: mol_type = other RNA
  modified_base 1: mod_base = OTHER; note = 2'-O-methyluridine-3'-phosphorothioate
  modified_base 2: mod_base = OTHER; note = 2'-O-methylcytidine-3'-phosphorothioate
  modified_base 3: mod_base = OTHER; note = 2'-O-methylcytidine-3'-phosphate
  modified_base 4: mod_base = OTHER; note = 2'-O-methyladenosine-3'-phosphate
  modified_base 5: mod_base = OTHER; note = 2'-O-methyladenosine-3'-phosphate
  modified_base 6: mod_base = OTHER; note = 2'-O-methylcytidine-3'-phosphate
  modified_base 7: mod_base = OTHER; note = 2'-deoxy-2'-fluorouridine-3'-phosphate
  modified_base 8: mod_base = OTHER; note = 2'-O-methylcytidine-3'-phosphate
  modified_base 9: mod_base = OTHER; note = 2'-deoxy-2'-fluorocytidine-3'-phosphate
  modified_base 10: mod_base = OTHER; note = 2'-deoxy-2'-fluorouridine-3'-phosphate
  modified_base 11: mod_base = OTHER; note = 2'-deoxy-2'-fluoroguanosine-3'-phosphate
  modified_base 12: mod_base = OTHER; note = 2'-O-methylcytidine-3'-phosphate
  modified_base 13: mod_base = OTHER; note = 2'-O-methyladenosine-3'-phosphate
  modified_base 14: mod_base = OTHER; note = 2'-O-methylcytidine-3'-phosphate
  modified_base 15: mod_base = OTHER; note = 2'-O-methylcytidine-3'-phosphate
  modified_base 16: mod_base = OTHER; note = 2'-O-methylguanosine-3'-phosphate
  modified_base 17: mod_base = OTHER; note = 2'-O-methyluridine-3'-phosphate
  modified_base 18: mod_base = OTHER; note = 2'-O-methyluridine-3'-phosphate
  modified_base 19: mod_base = OTHER; note = 2'-O-methylcytidine-3'-phosphate
  modified_base 20: mod_base = OTHER; note = 2'-O-methyluridine-3'-phosphate
  modified_base 21: mod_base = OTHER; note = 2'-O-methyluridine-3'-phosphate ((2S,4R)-1-[29-[[2-(acetylamino)-2-deoxy-beta-D-galactopyra nosyl]oxy]-14,14-bis[[3-[[3-[[5-[[2-(acetylamino)-2-deoxy-b eta-D-galactopyranosyl]oxy]-1-oxopentyl]amino]propyl]amino] -3-oxopropoxy]methyl]-1,12,19,25-tetraoxo-16-oxa-13,20,24-t riazanonacos-1-yl]-4-hydroxy-2-pyrrolidinyl)methyl ester
tccaactcctgcaccgttctt

SEQ ID NO: 226 - RNA, 21 nt, synthetic construct
  source 1..21: mol_type = other RNA
  modified_base 1: mod_base = OTHER; note = 2'-O-methylguanosine-3'-phosphorothioate
  modified_base 2: mod_base = OTHER; note = 2'-O-methyladenosine-3'-phosphorothioate
  modified_base 3: mod_base = OTHER; note = 2'-O-methylguanosine-3'-phosphate
  modified_base 4: mod_base = OTHER; note = 2'-O-methyladenosine-3'-phosphate
  modified_base 5: mod_base = OTHER; note = 2'-O-methyluridine-3'-phosphate
  modified_base 6: mod_base = OTHER; note = 2'-O-methylcytidine-3'-phosphate
  modified_base 7: mod_base = OTHER; note = 2'-deoxy-2'-fluoroguanosine-3'-phosphate
  modified_base 8: mod_base = OTHER; note = 2'-O-methylcytidine-3'-phosphate
  modified_base 9: mod_base = OTHER; note = 2'-deoxy-2'-fluorouridine-3'-phosphate
  modified_base 10: mod_base = OTHER; note = 2'-deoxy-2'-fluorouridine-3'-phosphate
  modified_base 11: mod_base = OTHER; note = 2'-deoxy-2'-fluoroadenosine-3'-phosphate
  modified_base 12: mod_base = OTHER; note = 2'-O-methylguanosine-3'-phosphate
  modified_base 13: mod_base = OTHER; note = 2'-O-methylcytidine-3'-phosphate
  modified_base 14: mod_base = OTHER; note = 2'-O-methylcytidine-3'-phosphate
  modified_base 15: mod_base = OTHER; note = 2'-O-methylguanosine-3'-phosphate
  modified_base 16: mod_base = OTHER; note = 2'-O-methylcytidine-3'-phosphate
  modified_base 17: mod_base = OTHER; note = 2'-O-methylguanosine-3'-phosphate
  modified_base 18: mod_base = OTHER; note = 2'-O-methylcytidine-3'-phosphate
  modified_base 19: mod_base = OTHER; note = 2'-O-methyluridine-3'-phosphate
  modified_base 20: mod_base = OTHER; note = 2'-O-methyluridine-3'-phosphate
  modified_base 21: mod_base = OTHER; note = 2'-O-methyluridine-3'-phosphate ((2S,4R)-1-[29-[[2-(acetylamino)-2-deoxy-beta-D-galactopyra nosyl]oxy]-14,14-bis[[3-[[3-[[5-[[2-(acetylamino)-2-deoxy-b eta-D-galactopyranosyl]oxy]-1-oxopentyl]amino]propyl]amino] -3-oxopropoxy]methyl]-1,12,19,25-tetraoxo-16-oxa-13,20,24-t riazanonacos-1-yl]-4-hydroxy-2-pyrrolidinyl)methyl ester
gagatcgcttagccgcgcttt

SEQ ID NO: 227 - RNA, 21 nt, synthetic construct
  source 1..21: mol_type = other RNA
  modified_base 1: mod_base = OTHER; note = 2'-O-methylcytidine-3'-phosphorothioate
  modified_base 2: mod_base = OTHER; note = 2'-O-methyluridine-3'-phosphorothioate
  modified_base 3: mod_base = OTHER; note = 2'-O-methylguanosine-3'-phosphate
  modified_base 4: mod_base = OTHER; note = 2'-O-methyluridine-3'-phosphate
  modified_base 5: mod_base = OTHER; note = 2'-O-methyluridine-3'-phosphate
  modified_base 6: mod_base = OTHER; note = 2'-O-methyluridine-3'-phosphate
  modified_base 7: mod_base = OTHER; note = 2'-deoxy-2'-fluoroguanosine-3'-phosphate
  modified_base 8: mod_base = OTHER; note = 2'-O-methylguanosine-3'-phosphate
  modified_base 9: mod_base = OTHER; note = 2'-deoxy-2'-fluorocytidine-3'-phosphate
  modified_base 10: mod_base = OTHER; note = 2'-deoxy-2'-fluorouridine-3'-phosphate
  modified_base 11: mod_base = OTHER; note = 2'-deoxy-2'-fluoroadenosine-3'-phosphate
  modified_base 12: mod_base = OTHER; note = 2'-O-methylcytidine-3'-phosphate
  modified_base 13: mod_base = OTHER; note = 2'-O-methylguanosine-3'-phosphate
  modified_base 14: mod_base = OTHER; note = 2'-O-methylguanosine-3'-phosphate
  modified_base 15: mod_base = OTHER; note = 2'-O-methyladenosine-3'-phosphate
  modified_base 16: mod_base = OTHER; note = 2'-O-methylguanosine-3'-phosphate
  modified_base 17: mod_base = OTHER; note = 2'-O-methyladenosine-3'-phosphate
  modified_base 18: mod_base = OTHER; note = 2'-O-methylcytidine-3'-phosphate
  modified_base 19: mod_base = OTHER; note = 2'-O-methylguanosine-3'-phosphate
  modified_base 20: mod_base = OTHER; note = 2'-O-methyluridine-3'-phosphate
  modified_base 21: mod_base = OTHER; note = 2'-O-methyluridine-3'-phosphate ((2S,4R)-1-[29-[[2-(acetylamino)-2-deoxy-beta-D-galactopyra nosyl]oxy]-14,14-bis[[3-[[3-[[5-[[2-(acetylamino)-2-deoxy-b eta-D-galactopyranosyl]oxy]-1-oxopentyl]amino]propyl]amino] -3-oxopropoxy]methyl]-1,12,19,25-tetraoxo-16-oxa-13,20,24-t riazanonacos-1-yl]-4-hydroxy-2-pyrrolidinyl)methyl ester
ctgtttggctacggagacgtt

SEQ ID NO: 228 - RNA, 21 nt, synthetic construct
  source 1..21: mol_type = other RNA
  modified_base 1: mod_base = OTHER; note = 2'-O-methylguanosine-3'-phosphorothioate
  modified_base 2: mod_base = OTHER; note = 2'-O-methyladenosine-3'-phosphorothioate
  modified_base 3: mod_base = OTHER; note = 2'-O-methylguanosine-3'-phosphate
  modified_base 4: mod_base = OTHER; note = 2'-O-methylcytidine-3'-phosphate
  modified_base 5: mod_base = OTHER; note = 2'-O-methyluridine-3'-phosphate
  modified_base 6: mod_base = OTHER; note = 2'-O-methylguanosine-3'-phosphate
  modified_base 7: mod_base = OTHER; note = 2'-deoxy-2'-fluoroguanosine-3'-phosphate
  modified_base 8: mod_base = OTHER; note = 2'-O-methyladenosine-3'-phosphate
  modified_base 9: mod_base = OTHER; note = 2'-deoxy-2'-fluoroguanosine-3'-phosphate
  modified_base 10: mod_base = OTHER; note = 2'-deoxy-2'-fluoroadenosine-3'-phosphate
  modified_base 11: mod_base = OTHER; note = 2'-deoxy-2'-fluorocytidine-3'-phosphate
  modified_base 12: mod_base = OTHER; note = 2'-O-methyladenosine-3'-phosphate
  modified_base 13: mod_base = OTHER; note = 2'-O-methylcytidine-3'-phosphate
  modified_base 14: mod_base = OTHER; note = 2'-O-methylcytidine-3'-phosphate
  modified_base 15: mod_base = OTHER; note = 2'-O-methyluridine-3'-phosphate
  modified_base 16: mod_base = OTHER; note = 2'-O-methyluridine-3'-phosphate
  modified_base 17: mod_base = OTHER; note = 2'-O-methylcytidine-3'-phosphate
  modified_base 18: mod_base = OTHER; note = 2'-O-methyladenosine-3'-phosphate
  modified_base 19: mod_base = OTHER; note = 2'-O-methyladenosine-3'-phosphate
  modified_base 20: mod_base = OTHER; note = 2'-O-methyluridine-3'-phosphate
  modified_base 21: mod_base = OTHER; note = 2'-O-methyluridine-3'-phosphate ((2S,4R)-1-[29-[[2-(acetylamino)-2-deoxy-beta-D-galactopyra nosyl]oxy]-14,14-bis[[3-[[3-[[5-[[2-(acetylamino)-2-deoxy-b eta-D-galactopyranosyl]oxy]-1-oxopentyl]amino]propyl]amino] -3-oxopropoxy]methyl]-1,12,19,25-tetraoxo-16-oxa-13,20,24-t riazanonacos-1-yl]-4-hydroxy-2-pyrrolidinyl)methyl ester
gagctggagacaccttcaatt

SEQ ID NO: 229 - RNA, 21 nt, synthetic construct
  source 1..21: mol_type = other RNA
  modified_base 1: mod_base = OTHER; note = 2'-O-methylguanosine-3'-phosphorothioate
  modified_base 2: mod_base = OTHER; note = 2'-O-methylguanosine-3'-phosphorothioate
  modified_base 3: mod_base = OTHER; note = 2'-O-methylcytidine-3'-phosphate
  modified_base 4: mod_base = OTHER; note = 2'-O-methyluridine-3'-phosphate
  modified_base 5: mod_base = OTHER; note = 2'-O-methylguanosine-3'-phosphate
  modified_base 6: mod_base = OTHER; note = 2'-O-methyladenosine-3'-phosphate
  modified_base 7: mod_base = OTHER; note = 2'-deoxy-2'-fluoroguanosine-3'-phosphate
  modified_base 8: mod_base = OTHER; note = 2'-O-methyladenosine-3'-phosphate
  modified_base 9: mod_base = OTHER; note = 2'-deoxy-2'-fluoroadenosine-3'-phosphate
  modified_base 10: mod_base = OTHER; note = 2'-deoxy-2'-fluoroguanosine-3'-phosphate
  modified_base 11: mod_base = OTHER; note = 2'-deoxy-2'-fluorouridine-3'-phosphate
  modified_base 12: mod_base = OTHER; note = 2'-O-methylguanosine-3'-phosphate
  modified_base 13: mod_base = OTHER; note = 2'-O-methylguanosine-3'-phosphate
  modified_base 14: mod_base = OTHER; note = 2'-O-methylguanosine-3'-phosphate
  modified_base 15: mod_base = OTHER; note = 2'-O-methyladenosine-3'-phosphate
  modified_base 16: mod_base = OTHER; note = 2'-O-methylguanosine-3'-phosphate
  modified_base 17: mod_base = OTHER; note = 2'-O-methylguanosine-3'-phosphate
  modified_base 18: mod_base = OTHER; note = 2'-O-methylcytidine-3'-phosphate
  modified_base 19: mod_base = OTHER; note = 2'-O-methylguanosine-3'-phosphate
  modified_base 20: mod_base = OTHER; note = 2'-O-methyluridine-3'-phosphate
  modified_base 21: mod_base = OTHER; note = 2'-O-methyluridine-3'-phosphate ((2S,4R)-1-[29-[[2-(acetylamino)-2-deoxy-beta-D-galactopyra nosyl]oxy]-14,14-bis[[3-[[3-[[5-[[2-(acetylamino)-2-deoxy-b eta-D-galactopyranosyl]oxy]-1-oxopentyl]amino]propyl]amino] -3-oxopropoxy]methyl]-1,12,19,25-tetraoxo-16-oxa-13,20,24-t riazanonacos-1-yl]-4-hydroxy-2-pyrrolidinyl)methyl ester
ggctgagaagtgggaggcgtt

SEQ ID NO: 230 - RNA, 21 nt, synthetic construct
  source 1..21: mol_type = other RNA
  modified_base 1: mod_base = OTHER; note = 2'-O-methylguanosine-3'-phosphorothioate
  modified_base 2: mod_base = OTHER; note = 2'-O-methyladenosine-3'-phosphorothioate
  modified_base 3: mod_base = OTHER; note = 2'-O-methylguanosine-3'-phosphate
  modified_base 4: mod_base = OTHER; note = 2'-O-methyladenosine-3'-phosphate
  modified_base 5: mod_base = OTHER; note = 2'-O-methylcytidine-3'-phosphate
  modified_base 6: mod_base = OTHER; note = 2'-O-methylguanosine-3'-phosphate
  modified_base 7: mod_base = OTHER; note = 2'-deoxy-2'-fluorouridine-3'-phosphate
  modified_base 8: mod_base = OTHER; note = 2'-O-methylguanosine-3'-phosphate
  modified_base 9: mod_base = OTHER; note = 2'-deoxy-2'-fluoroguanosine-3'-phosphate
  modified_base 10: mod_base = OTHER; note = 2'-deoxy-2'-fluorouridine-3'-phosphate
  modified_base 11: mod_base = OTHER; note = 2'-deoxy-2'-fluoroguanosine-3'-phosphate
  modified_base 12: mod_base = OTHER; note = 2'-O-methyluridine-3'-phosphate
  modified_base 13: mod_base = OTHER; note = 2'-O-methyluridine-3'-phosphate
  modified_base 14: mod_base = OTHER; note = 2'-O-methyluridine-3'-phosphate
  modified_base 15: mod_base = OTHER; note = 2'-O-methylguanosine-3'-phosphate
  modified_base 16: mod_base = OTHER; note = 2'-O-methyluridine-3'-phosphate
  modified_base 17: mod_base = OTHER; note = 2'-O-methylcytidine-3'-phosphate
  modified_base 18: mod_base = OTHER; note = 2'-O-methyladenosine-3'-phosphate
  modified_base 19: mod_base = OTHER; note = 2'-O-methylguanosine-3'-phosphate
  modified_base 20: mod_base = OTHER; note = 2'-O-methylcytidine-3'-phosphate
  modified_base 21: mod_base = OTHER; note = 2'-O-methyladenosine-3'-phosphate ((2S,4R)-1-[29-[[2-(acetylamino)-2-deoxy-beta-D-galactopyra nosyl]oxy]-14,14-bis[[3-[[3-[[5-[[2-(acetylamino)-2-deoxy-b eta-D-galactopyranosyl]oxy]-1-oxopentyl]amino]propyl]amino] -3-oxopropoxy]methyl]-1,12,19,25-tetraoxo-16-oxa-13,20,24-t riazanonacos-1-yl]-4-hydroxy-2-pyrrolidinyl)methyl ester
gagacgtggtgtttgtcagca

SEQ ID NO: 231 - RNA, 21 nt, synthetic construct
  source 1..21: mol_type = other RNA
  modified_base 1: mod_base = OTHER; note = 2'-O-methyladenosine-3'-phosphorothioate
  modified_base 2: mod_base = OTHER; note = 2'-O-methylguanosine-3'-phosphorothioate
  modified_base 3: mod_base = OTHER; note = 2'-O-methyladenosine-3'-phosphate
  modified_base 4: mod_base = OTHER; note = 2'-O-methylguanosine-3'-phosphate
  modified_base 5: mod_base = OTHER; note = 2'-O-methyladenosine-3'-phosphate
  modified_base 6: mod_base = OTHER; note = 2'-O-methyladenosine-3'-phosphate
  modified_base 7: mod_base = OTHER; note = 2'-deoxy-2'-fluoroguanosine-3'-phosphate
  modified_base 8: mod_base = OTHER; note = 2'-O-methylcytidine-3'-phosphate
  modified_base 9: mod_base = OTHER; note = 2'-deoxy-2'-fluoroadenosine-3'-phosphate
  modified_base 10: mod_base = OTHER; note = 2'-deoxy-2'-fluoroguanosine-3'-phosphate
  modified_base 11: mod_base = OTHER; note = 2'-deoxy-2'-fluoroadenosine-3'-phosphate
  modified_base 12: mod_base = OTHER; note = 2'-O-methyluridine-3'-phosphate
  modified_base 13: mod_base = OTHER; note = 2'-O-methylcytidine-3'-phosphate
  modified_base 14: mod_base = OTHER; note = 2'-O-methylcytidine-3'-phosphate
  modified_base 15: mod_base = OTHER; note = 2'-O-methyluridine-3'-phosphate
  modified_base 16: mod_base = OTHER; note = 2'-O-methylguanosine-3'-phosphate
  modified_base 17: mod_base = OTHER; note = 2'-O-methyluridine-3'-phosphate
  modified_base 18: mod_base = OTHER; note = 2'-O-methylguanosine-3'-phosphate
  modified_base 19: mod_base = OTHER; note = 2'-O-methylcytidine-3'-phosphate
  modified_base 20: mod_base = OTHER; note = 2'-O-methylguanosine-3'-phosphate
  modified_base 21: mod_base = OTHER; note = 2'-O-methyluridine-3'-phosphate ((2S,4R)-1-[29-[[2-(acetylamino)-2-deoxy-beta-D-galactopyra nosyl]oxy]-14,14-bis[[3-[[3-[[5-[[2-(acetylamino)-2-deoxy-b eta-D-galactopyranosyl]oxy]-1-oxopentyl]amino]propyl]amino] -3-oxopropoxy]methyl]-1,12,19,25-tetraoxo-16-oxa-13,20,24-t riazanonacos-1-yl]-4-hydroxy-2-pyrrolidinyl)methyl ester
agagaagcagatcctgtgcgt

SEQ ID NO: 232 - RNA, 21 nt, synthetic construct
  source 1..21: mol_type = other RNA
  modified_base 1: mod_base = OTHER; note = 2'-O-methyluridine-3'-phosphorothioate
  modified_base 2: mod_base = OTHER; note = 2'-O-methyluridine-3'-phosphorothioate
  modified_base 3: mod_base = OTHER; note = 2'-O-methyluridine-3'-phosphate
  modified_base 4: mod_base = OTHER; note = 2'-O-methyluridine-3'-phosphate
  modified_base 5: mod_base = OTHER; note = 2'-O-methylcytidine-3'-phosphate
  modified_base 6: mod_base = OTHER; note = 2'-O-methyluridine-3'-phosphate
  modified_base 7: mod_base = OTHER; note = 2'-deoxy-2'-fluorocytidine-3'-phosphate
  modified_base 8: mod_base = OTHER; note = 2'-O-methyluridine-3'-phosphate
  modified_base 9: mod_base = OTHER; note = 2'-deoxy-2'-fluorouridine-3'-phosphate
  modified_base 10: mod_base = OTHER; note = 2'-deoxy-2'-fluorouridine-3'-phosphate
  modified_base 11: mod_base = OTHER; note = 2'-deoxy-2'-fluoroguanosine-3'-phosphate
  modified_base 12: mod_base = OTHER; note = 2'-O-methylcytidine-3'-phosphate
  modified_base 13: mod_base = OTHER; note = 2'-O-methyladenosine-3'-phosphate
  modified_base 14: mod_base = OTHER; note = 2'-O-methyluridine-3'-phosphate
  modified_base 15: mod_base = OTHER; note = 2'-O-methyluridine-3'-phosphate
  modified_base 16: mod_base = OTHER; note = 2'-O-methylcytidine-3'-phosphate
  modified_base 17: mod_base = OTHER; note = 2'-O-methyluridine-3'-phosphate
  modified_base 18: mod_base = OTHER; note = 2'-O-methylcytidine-3'-phosphate
  modified_base 19: mod_base = OTHER; note = 2'-O-methylguanosine-3'-phosphate
  modified_base 20: mod_base = OTHER; note = 2'-O-methyladenosine-3'-phosphate
  modified_base 21: mod_base = OTHER; note = 2'-O-methyluridine-3'-phosphate ((2S,4R)-1-[29-[[2-(acetylamino)-2-deoxy-beta-D-galactopyra nosyl]oxy]-14,14-bis[[3-[[3-[[5-[[2-(acetylamino)-2-deoxy-b eta-D-galactopyranosyl]oxy]-1-oxopentyl]amino]propyl]amino] -3-oxopropoxy]methyl]-1,12,19,25-tetraoxo-16-oxa-13,20,24-t riazanonacos-1-yl]-4-hydroxy-2-pyrrolidinyl)methyl ester
ttttctctttgcattctcgat

SEQ ID NO: 233 - RNA, 21 nt, synthetic construct
  source 1..21: mol_type = other RNA
  modified_base 1: mod_base = OTHER; note = 2'-O-methylguanosine-3'-phosphorothioate
  modified_base 2: mod_base = OTHER; note = 2'-O-methylguanosine-3'-phosphorothioate
  modified_base 3: mod_base = OTHER; note = 2'-O-methyladenosine-3'-phosphate
  modified_base 4: mod_base = OTHER; note = 2'-O-methylguanosine-3'-phosphate
  modified_base 5: mod_base = OTHER; note = 2'-O-methylcytidine-3'-phosphate
  modified_base 6: mod_base = OTHER; note = 2'-O-methylcytidine-3'-phosphate
  modified_base 7: mod_base = OTHER; note = 2'-deoxy-2'-fluorocytidine-3'-phosphate
  modified_base 8: mod_base = OTHER; note = 2'-O-methyladenosine-3'-phosphate
  modified_base 9: mod_base = OTHER; note = 2'-deoxy-2'-fluorocytidine-3'-phosphate
  modified_base 10: mod_base = OTHER; note = 2'-deoxy-2'-fluorocytidine-3'-phosphate
  modified_base 11: mod_base = OTHER; note = 2'-deoxy-2'-fluorouridine-3'-phosphate
  modified_base 12: mod_base = OTHER; note = 2'-O-methyluridine-3'-phosphate
  modified_base 13: mod_base = OTHER; note = 2'-O-methylguanosine-3'-phosphate
  modified_base 14: mod_base = OTHER; note = 2'-O-methylguanosine-3'-phosphate
  modified_base 15: mod_base = OTHER; note = 2'-O-methyladenosine-3'-phosphate
  modified_base 16: mod_base = OTHER; note = 2'-O-methyladenosine-3'-phosphate
  modified_base 17: mod_base = OTHER; note = 2'-O-methyluridine-3'-phosphate
  modified_base 18: mod_base = OTHER; note = 2'-O-methyluridine-3'-phosphate
  modified_base 19: mod_base = OTHER; note = 2'-O-methyladenosine-3'-phosphate
  modified_base 20: mod_base = OTHER; note = 2'-O-methyladenosine-3'-phosphate
  modified_base 21: mod_base = OTHER; note = 2'-O-methyluridine-3'-phosphate ((2S,4R)-1-[29-[[2-(acetylamino)-2-deoxy-beta-D-galactopyra nosyl]oxy]-14,14-bis[[3-[[3-[[5-[[2-(acetylamino)-2-deoxy-b eta-D-galactopyranosyl]oxy]-1-oxopentyl]amino]propyl]amino] -3-oxopropoxy]methyl]-1,12,19,25-tetraoxo-16-oxa-13,20,24-t riazanonacos-1-yl]-4-hydroxy-2-pyrrolidinyl)methyl ester
ggagcccaccttggaattaat

SEQ ID NO: 234 - RNA, 21 nt, synthetic construct
  source 1..21: mol_type = other RNA
  modified_base 1: mod_base = OTHER; note = 2'-O-methyluridine-3'-phosphorothioate
  modified_base 2: mod_base = OTHER; note = 2'-O-methyluridine-3'-phosphorothioate
  modified_base 3: mod_base = OTHER; note = 2'-O-methyluridine-3'-phosphate
  modified_base 4: mod_base = OTHER; note = 2'-O-methylguanosine-3'-phosphate
  modified_base 5: mod_base = OTHER; note = 2'-O-methylcytidine-3'-phosphate
  modified_base 6: mod_base = OTHER; note = 2'-O-methyladenosine-3'-phosphate
  modified_base 7: mod_base = OTHER; note = 2'-deoxy-2'-fluorouridine-3'-phosphate
  modified_base 8: mod_base = OTHER; note = 2'-O-methyluridine-3'-phosphate
  modified_base 9: mod_base = OTHER; note = 2'-deoxy-2'-fluorocytidine-3'-phosphate
  modified_base 10: mod_base = OTHER; note = 2'-deoxy-2'-fluorouridine-3'-phosphate
  modified_base 11: mod_base = OTHER; note = 2'-deoxy-2'-fluorocytidine-3'-phosphate
  modified_base 12: mod_base = OTHER; note = 2'-O-methylguanosine-3'-phosphate
  modified_base 13: mod_base = OTHER; note = 2'-O-methyladenosine-3'-phosphate
  modified_base 14: mod_base = OTHER; note = 2'-O-methylguanosine-3'-phosphate
  modified_base 15: mod_base = OTHER; note = 2'-O-methyladenosine-3'-phosphate
  modified_base 16: mod_base = OTHER; note = 2'-O-methyluridine-3'-phosphate
  modified_base 17: mod_base = OTHER; note = 2'-O-methylcytidine-3'-phosphate
  modified_base 18: mod_base = OTHER; note = 2'-O-methylguanosine-3'-phosphate
  modified_base 19: mod_base = OTHER; note = 2'-O-methylcytidine-3'-phosphate
  modified_base 20: mod_base = OTHER; note = 2'-O-methyluridine-3'-phosphate
  modified_base 21: mod_base = OTHER; note = 2'-O-methyluridine-3'-phosphate ((2S,4R)-1-[29-[[2-(acetylamino)-2-deoxy-beta-D-galactopyra nosyl]oxy]-14,14-bis[[3-[[3-[[5-[[2-(acetylamino)-2-deoxy-b eta-D-galactopyranosyl]oxy]-1-oxopentyl]amino]propyl]amino] -3-oxopropoxy]methyl]-1,12,19,25-tetraoxo-16-oxa-13,20,24-t riazanonacos-1-yl]-4-hydroxy-2-pyrrolidinyl)methyl ester
tttgcattctcgagatcgctt

SEQ ID NO: 235 - RNA, 21 nt, synthetic construct
  source 1..21: mol_type = other RNA
  modified_base 1: mod_base = OTHER; note = 2'-O-methylcytidine-3'-phosphorothioate
  modified_base 2: mod_base = OTHER; note = 2'-O-methyluridine-3'-phosphorothioate
  modified_base 3: mod_base = OTHER; note = 2'-O-methylcytidine-3'-phosphate
  modified_base 4: mod_base = OTHER; note = 2'-O-methylcytidine-3'-phosphate
  modified_base 5: mod_base = OTHER; note = 2'-O-methyladenosine-3'-phosphate
  modified_base 6: mod_base = OTHER; note = 2'-O-methylcytidine-3'-phosphate
  modified_base 7: mod_base = OTHER; note = 2'-deoxy-2'-fluorouridine-3'-phosphate
  modified_base 8: mod_base = OTHER; note = 2'-O-methylcytidine-3'-phosphate
  modified_base 9: mod_base = OTHER; note = 2'-deoxy-2'-fluoroguanosine-3'-phosphate
  modified_base 10: mod_base = OTHER; note = 2'-deoxy-2'-fluoroguanosine-3'-phosphate
  modified_base 11: mod_base = OTHER; note = 2'-deoxy-2'-fluoroadenosine-3'-phosphate
  modified_base 12: mod_base = OTHER; note = 2'-O-methyluridine-3'-phosphate
  modified_base 13: mod_base = OTHER; note = 2'-O-methylguanosine-3'-phosphate
  modified_base 14: mod_base = OTHER; note = 2'-O-methylcytidine-3'-phosphate
  modified_base 15: mod_base = OTHER; note = 2'-O-methyluridine-3'-phosphate
  modified_base 16: mod_base = OTHER; note = 2'-O-methyluridine-3'-phosphate
  modified_base 17: mod_base = OTHER; note = 2'-O-methyluridine-3'-phosphate
  modified_base 18: mod_base = OTHER; note = 2'-O-methylcytidine-3'-phosphate
  modified_base 19: mod_base = OTHER; note = 2'-O-methylcytidine-3'-phosphate
  modified_base 20: mod_base = OTHER; note = 2'-O-methylcytidine-3'-phosphate
  modified_base 21: mod_base = OTHER; note = 2'-O-methyluridine-3'-phosphate ((2S,4R)-1-[29-[[2-(acetylamino)-2-deoxy-beta-D-galactopyra nosyl]oxy]-14,14-bis[[3-[[3-[[5-[[2-(acetylamino)-2-deoxy-b eta-D-galactopyranosyl]oxy]-1-oxopentyl]amino]propyl]amino] -3-oxopropoxy]methyl]-1,12,19,25-tetraoxo-16-oxa-13,20,24-t riazanonacos-1-yl]-4-hydroxy-2-pyrrolidinyl)methyl ester
ctccactcggatgctttccct

SEQ ID NO: 236 - RNA, 21 nt, synthetic construct
  source 1..21: mol_type = other RNA
  modified_base 1: mod_base = OTHER; note = 2'-O-methylguanosine-3'-phosphorothioate
  modified_base 2: mod_base = OTHER; note = 2'-O-methylguanosine-3'-phosphorothioate
  modified_base 3: mod_base = OTHER; note = 2'-O-methylcytidine-3'-phosphate
  modified_base 4: mod_base = OTHER; note = 2'-O-methyluridine-3'-phosphate
  modified_base 5: mod_base = OTHER; note = 2'-O-methyluridine-3'-phosphate
  modified_base 6: mod_base = OTHER; note = 2'-O-methylguanosine-3'-phosphate
  modified_base 7: mod_base = OTHER; note = 2'-deoxy-2'-fluorouridine-3'-phosphate
  modified_base 8: mod_base = OTHER; note = 2'-O-methyladenosine-3'-phosphate
  modified_base 9: mod_base = OTHER; note = 2'-deoxy-2'-fluorouridine-3'-phosphate
  modified_base 10: mod_base = OTHER; note = 2'-deoxy-2'-fluoroguanosine-3'-phosphate
  modified_base 11: mod_base = OTHER; note = 2'-deoxy-2'-fluoroguanosine-3'-phosphate
  modified_base 12: mod_base = OTHER; note = 2'-O-methyluridine-3'-phosphate
  modified_base 13: mod_base = OTHER; note = 2'-O-methylcytidine-3'-phosphate
  modified_base 14: mod_base = OTHER; note = 2'-O-methylguanosine-3'-phosphate
  modified_base 15: mod_base = OTHER; note = 2'-O-methyluridine-3'-phosphate
  modified_base 16: mod_base = OTHER; note = 2'-O-methylguanosine-3'-phosphate
  modified_base 17: mod_base = OTHER; note = 2'-O-methyluridine-3'-phosphate
  modified_base 18: mod_base = OTHER; note = 2'-O-methylguanosine-3'-phosphate
  modified_base 19: mod_base = OTHER; note = 2'-O-methyladenosine-3'-phosphate
  modified_base 20: mod_base = OTHER; note = 2'-O-methylguanosine-3'-phosphate
  modified_base 21: mod_base = OTHER; note = 2'-O-methyluridine-3'-phosphate ((2S,4R)-1-[29-[[2-(acetylamino)-2-deoxy-beta-D-galactopyra nosyl]oxy]-14,14-bis[[3-[[3-[[5-[[2-(acetylamino)-2-deoxy-b eta-D-galactopyranosyl]oxy]-1-oxopentyl]amino]propyl]amino] -3-oxopropoxy]methyl]-1,12,19,25-tetraoxo-16-oxa-13,20,24-t riazanonacos-1-yl]-4-hydroxy-2-pyrrolidinyl)methyl ester
ggcttgtatggtcgtgtgagt

SEQ ID NO: 237 - RNA, 21 nt, synthetic construct
  source 1..21: mol_type = other RNA
  modified_base 1: mod_base = OTHER; note = 2'-O-methylguanosine-3'-phosphorothioate
  modified_base 2: mod_base = OTHER; note = 2'-O-methylguanosine-3'-phosphorothioate
  modified_base 3: mod_base = OTHER; note = 2'-O-methylcytidine-3'-phosphate
  modified_base 4: mod_base = OTHER; note = 2'-O-methyluridine-3'-phosphate
  modified_base 5: mod_base = OTHER; note = 2'-O-methyladenosine-3'-phosphate
  modified_base 6: mod_base = OTHER; note = 2'-O-methylcytidine-3'-phosphate
  modified_base 7: mod_base = OTHER; note = 2'-deoxy-2'-fluoroguanosine-3'-phosphate
  modified_base 8: mod_base = OTHER; note = 2'-O-methylguanosine-3'-phosphate
  modified_base 9: mod_base = OTHER; note = 2'-deoxy-2'-fluoroadenosine-3'-phosphate
  modified_base 10: mod_base = OTHER; note = 2'-deoxy-2'-fluoroguanosine-3'-phosphate
  modified_base 11: mod_base = OTHER; note = 2'-deoxy-2'-fluoroadenosine-3'-phosphate
  modified_base 12: mod_base = OTHER; note = 2'-O-methylcytidine-3'-phosphate
  modified_base 13: mod_base = OTHER; note = 2'-O-methylguanosine-3'-phosphate
  modified_base 14: mod_base = OTHER; note = 2'-O-methyluridine-3'-phosphate
  modified_base 15: mod_base = OTHER; note = 2'-O-methylguanosine-3'-phosphate
  modified_base 16: mod_base = OTHER; note = 2'-O-methylguanosine-3'-phosphate
  modified_base 17: mod_base = OTHER; note = 2'-O-methyluridine-3'-phosphate
  modified_base 18: mod_base = OTHER; note = 2'-O-methylguanosine-3'-phosphate
  modified_base 19: mod_base = OTHER; note = 2'-O-methyluridine-3'-phosphate
  modified_base 20: mod_base = OTHER; note = 2'-O-methyluridine-3'-phosphate
  modified_base 21: mod_base = OTHER; note = 2'-O-methyluridine-3'-phosphate ((2S,4R)-1-[29-[[2-(acetylamino)-2-deoxy-beta-D-galactopyra nosyl]oxy]-14,14-bis[[3-[[3-[[5-[[2-(acetylamino)-2-deoxy-b eta-D-galactopyranosyl]oxy]-1-oxopentyl]amino]propyl]amino] -3-oxopropoxy]methyl]-1,12,19,25-tetraoxo-16-oxa-13,20,24-t riazanonacos-1-yl]-4-hydroxy-2-pyrrolidinyl)methyl ester
ggctacggagacgtggtgttt

SEQ ID NO: 238 - RNA, 21 nt, synthetic construct
  source 1..21: mol_type = other RNA
  modified_base 1: mod_base = OTHER; note = 2'-O-methyluridine-3'-phosphorothioate
  modified_base 2: mod_base = OTHER; note = 2'-O-methyluridine-3'-phosphorothioate
  modified_base 3: mod_base = OTHER; note = 2'-O-methylguanosine-3'-phosphate
  modified_base 4: mod_base = OTHER; note = 2'-O-methyladenosine-3'-phosphate
  modified_base 5: mod_base = OTHER; note = 2'-O-methylguanosine-3'-phosphate
  modified_base 6: mod_base = OTHER; note = 2'-O-methyladenosine-3'-phosphate
  modified_base 7: mod_base = OTHER; note = 2'-deoxy-2'-fluoroadenosine-3'-phosphate
  modified_base 8: mod_base = OTHER; note = 2'-O-methylguanosine-3'-phosphate
  modified_base 9: mod_base = OTHER; note = 2'-deoxy-2'-fluoroguanosine-3'-phosphate
  modified_base 10: mod_base = OTHER; note = 2'-deoxy-2'-fluorouridine-3'-phosphate
  modified_base 11: mod_base = OTHER; note = 2'-deoxy-2'-fluorouridine-3'-phosphate
  modified_base 12: mod_base = OTHER; note = 2'-O-methylguanosine-3'-phosphate
  modified_base 13: mod_base = OTHER; note = 2'-O-methyladenosine-3'-phosphate
  modified_base 14: mod_base = OTHER; note = 2'-O-methyluridine-3'-phosphate
  modified_base 15: mod_base = OTHER; note = 2'-O-methylcytidine-3'-phosphate
  modified_base 16: mod_base = OTHER; note = 2'-O-methyluridine-3'-phosphate
  modified_base 17: mod_base = OTHER; note = 2'-O-methylguanosine-3'-phosphate
  modified_base 18: mod_base = OTHER; note = 2'-O-methyladenosine-3'-phosphate
  modified_base 19: mod_base = OTHER; note = 2'-O-methylcytidine-3'-phosphate
  modified_base 20: mod_base = OTHER; note = 2'-O-methylcytidine-3'-phosphate
  modified_base 21: mod_base = OTHER; note = 2'-O-methyluridine-3'-phosphate ((2S,4R)-1-[29-[[2-(acetylamino)-2-deoxy-beta-D-galactopyra nosyl]oxy]-14,14-bis[[3-[[3-[[5-[[2-(acetylamino)-2-deoxy-b eta-D-galactopyranosyl]oxy]-1-oxopentyl]amino]propyl]amino] -3-oxopropoxy]methyl]-1,12,19,25-tetraoxo-16-oxa-13,20,24-t riazanonacos-1-yl]-4-hydroxy-2-pyrrolidinyl)methyl ester
ttgagaaggttgatctgacct

SEQ ID NO: 239 - RNA, 21 nt, synthetic construct
  source 1..21: mol_type = other RNA
  modified_base 1: mod_base = OTHER; note = 2'-O-methylguanosine-3'-phosphorothioate
  modified_base 2: mod_base = OTHER; note = 2'-O-methyladenosine-3'-phosphorothioate
  modified_base 3: mod_base = OTHER; note = 2'-O-methylguanosine-3'-phosphate
  modified_base 4: mod_base = OTHER; note = 2'-O-methylcytidine-3'-phosphate
  modified_base 5: mod_base = OTHER; note = 2'-O-methylcytidine-3'-phosphate
  modified_base 6: mod_base = OTHER; note = 2'-O-methylcytidine-3'-phosphate
  modified_base 7: mod_base = OTHER; note = 2'-deoxy-2'-fluoroadenosine-3'-phosphate
  modified_base 8: mod_base = OTHER; note = 2'-O-methylcytidine-3'-phosphate
  modified_base 9: mod_base = OTHER; note = 2'-deoxy-2'-fluorocytidine-3'-phosphate
  modified_base 10: mod_base = OTHER; note = 2'-deoxy-2'-fluorouridine-3'-phosphate
  modified_base 11: mod_base = OTHER; note = 2'-deoxy-2'-fluorouridine-3'-phosphate
  modified_base 12: mod_base = OTHER; note = 2'-O-methylguanosine-3'-phosphate
  modified_base 13: mod_base = OTHER; note = 2'-O-methylguanosine-3'-phosphate
  modified_base 14: mod_base = OTHER; note = 2'-O-methyladenosine-3'-phosphate
  modified_base 15: mod_base = OTHER; note = 2'-O-methyladenosine-3'-phosphate
  modified_base 16: mod_base = OTHER; note = 2'-O-methyluridine-3'-phosphate
  modified_base 17: mod_base = OTHER; note = 2'-O-methyluridine-3'-phosphate
  modified_base 18: mod_base = OTHER; note = 2'-O-methyladenosine-3'-phosphate
  modified_base 19: mod_base = OTHER; note = 2'-O-methyladenosine-3'-phosphate
  modified_base 20: mod_base = OTHER; note = 2'-O-methylguanosine-3'-phosphate
  modified_base 21: mod_base = OTHER; note = 2'-O-methyluridine-3'-phosphate ((2S,4R)-1-[29-[[2-(acetylamino)-2-deoxy-beta-D-galactopyra nosyl]oxy]-14,14-bis[[3-[[3-[[5-[[2-(acetylamino)-2-deoxy-b eta-D-galactopyranosyl]oxy]-1-oxopentyl]amino]propyl]amino] -3-oxopropoxy]methyl]-1,12,19,25-tetraoxo-16-oxa-13,20,24-t riazanonacos-1-yl]-4-hydroxy-2-pyrrolidinyl)methyl ester
gagcccaccttggaattaagt

SEQ ID NO: 240 - RNA, 21 nt, synthetic construct
  source 1..21: mol_type = other RNA
  modified_base 1: mod_base = OTHER; note = 2'-O-methylcytidine-3'-phosphorothioate
  modified_base 2: mod_base = OTHER; note = 2'-O-methyluridine-3'-phosphorothioate
  modified_base 3: mod_base = OTHER; note = 2'-O-methyluridine-3'-phosphate
  modified_base 4: mod_base = OTHER; note = 2'-O-methylguanosine-3'-phosphate
  modified_base 5: mod_base = OTHER; note = 2'-O-methyluridine-3'-phosphate
  modified_base 6: mod_base = OTHER; note = 2'-O-methylcytidine-3'-phosphate
  modified_base 7: mod_base = OTHER; note = 2'-deoxy-2'-fluorouridine-3'-phosphate
  modified_base 8: mod_base = OTHER; note = 2'-O-methylguanosine-3'-phosphate
  modified_base 9: mod_base = OTHER; note = 2'-deoxy-2'-fluorouridine-3'-phosphate
  modified_base 10: mod_base = OTHER; note = 2'-deoxy-2'-fluoroguanosine-3'-phosphate
  modified_base 11: mod_base = OTHER; note = 2'-deoxy-2'-fluorocytidine-3'-phosphate
  modified_base 12: mod_base = OTHER; note = 2'-O-methylcytidine-3'-phosphate
  modified_base 13: mod_base = OTHER; note = 2'-O-methyluridine-3'-phosphate
  modified_base 14: mod_base = OTHER; note = 2'-O-methylguanosine-3'-phosphate
  modified_base 15: mod_base = OTHER; note = 2'-O-methylguanosine-3'-phosphate
  modified_base 16: mod_base = OTHER; note = 2'-O-methylguanosine-3'-phosphate
  modified_base 17: mod_base = OTHER; note = 2'-O-methylcytidine-3'-phosphate
  modified_base 18: mod_base = OTHER; note = 2'-O-methyluridine-3'-phosphate
  modified_base 19: mod_base = OTHER; note = 2'-O-methylguanosine-3'-phosphate
  modified_base 20: mod_base = OTHER; note = 2'-O-methyladenosine-3'-phosphate
  modified_base 21: mod_base = OTHER; note = 2'-O-methyluridine-3'-phosphate ((2S,4R)-1-[29-[[2-(acetylamino)-2-deoxy-beta-D-galactopyra nosyl]oxy]-14,14-bis[[3-[[3-[[5-[[2-(acetylamino)-2-deoxy-b eta-D-galactopyranosyl]oxy]-1-oxopentyl]amino]propyl]amino] -3-oxopropoxy]methyl]-1,12,19,25-tetraoxo-16-oxa-13,20,24-t riazanonacos-1-yl]-4-hydroxy-2-pyrrolidinyl)methyl ester
cttgtctgtgcctgggctgat

SEQ ID NO: 241 - RNA, 21 nt, synthetic construct
  source 1..21: mol_type = other RNA
  modified_base 1: mod_base = OTHER; note = 2'-O-methyluridine-3'-phosphorothioate
  modified_base 2: mod_base = OTHER; note = 2'-O-methylcytidine-3'-phosphorothioate
  modified_base 3: mod_base = OTHER; note = 2'-O-methyluridine-3'-phosphate
  modified_base 4: mod_base = OTHER; note = 2'-O-methyluridine-3'-phosphate
  modified_base 5: mod_base = OTHER; note = 2'-O-methyluridine-3'-phosphate
  modified_base 6: mod_base = OTHER; note = 2'-O-methylguanosine-3'-phosphate
  modified_base 7: mod_base = OTHER; note = 2'-deoxy-2'-fluorocytidine-3'-phosphate
  modified_base 8: mod_base = OTHER; note = 2'-O-methyladenosine-3'-phosphate
  modified_base 9: mod_base = OTHER; note = 2'-deoxy-2'-fluorouridine-3'-phosphate
  modified_base 10: mod_base = OTHER; note = 2'-deoxy-2'-fluorouridine-3'-phosphate
  modified_base 11: mod_base = OTHER; note = 2'-deoxy-2'-fluorocytidine-3'-phosphate
  modified_base 12: mod_base = OTHER; note = 2'-O-methyluridine-3'-phosphate
  modified_base 13: mod_base = OTHER; note = 2'-O-methylcytidine-3'-phosphate
  modified_base 14: mod_base = OTHER; note = 2'-O-methylguanosine-3'-phosphate
  modified_base 15: mod_base = OTHER; note = 2'-O-methyladenosine-3'-phosphate
  modified_base 16: mod_base = OTHER; note = 2'-O-methylguanosine-3'-phosphate
  modified_base 17: mod_base = OTHER; note = 2'-O-methyladenosine-3'-phosphate
  modified_base 18: mod_base = OTHER; note = 2'-O-methyluridine-3'-phosphate
  modified_base 19: mod_base = OTHER; note = 2'-O-methylcytidine-3'-phosphate
  modified_base 20: mod_base = OTHER; note = 2'-O-methylguanosine-3'-phosphate
  modified_base 21: mod_base = OTHER; note = 2'-O-methyluridine-3'-phosphate ((2S,4R)-1-[29-[[2-(acetylamino)-2-deoxy-beta-D-galactopyra nosyl]oxy]-14,14-bis[[3-[[3-[[5-[[2-(acetylamino)-2-deoxy-b eta-D-galactopyranosyl]oxy]-1-oxopentyl]amino]propyl]amino] -3-oxopropoxy]methyl]-1,12,19,25-tetraoxo-16-oxa-13,20,24-t riazanonacos-1-yl]-4-hydroxy-2-pyrrolidinyl)methyl ester
tctttgcattctcgagatcgt

SEQ ID NO: 242 - RNA, 21 nt, synthetic construct
  source 1..21: mol_type = other RNA
  modified_base 1: mod_base = OTHER; note = 2'-O-methylguanosine-3'-phosphorothioate
  modified_base 2: mod_base = OTHER; note = 2'-O-methylcytidine-3'-phosphorothioate
  modified_base 3: mod_base = OTHER; note = 2'-O-methyladenosine-3'-phosphate
  modified_base 4: mod_base = OTHER; note = 2'-O-methylguanosine-3'-phosphate
  modified_base 5: mod_base = OTHER; note = 2'-O-methylguanosine-3'-phosphate
  modified_base 6: mod_base = OTHER; note = 2'-O-methyladenosine-3'-phosphate
  modified_base 7: mod_base = OTHER; note = 2'-deoxy-2'-fluoroadenosine-3'-phosphate
  modified_base 8: mod_base = OTHER; note = 2'-O-methylguanosine-3'-phosphate
  modified_base 9: mod_base = OTHER; note = 2'-deoxy-2'-fluorocytidine-3'-phosphate
  modified_base 10: mod_base = OTHER; note = 2'-deoxy-2'-fluoroadenosine-3'-phosphate
  modified_base 11: mod_base = OTHER; note = 2'-deoxy-2'-fluorocytidine-3'-phosphate
  modified_base 12: mod_base = OTHER; note = 2'-O-methyluridine-3'-phosphate
  modified_base 13: mod_base = OTHER; note = 2'-O-methylguanosine-3'-phosphate
  modified_base 14: mod_base = OTHER; note = 2'-O-methyladenosine-3'-phosphate
  modified_base 15: mod_base = OTHER; note = 2'-O-methylguanosine-3'-phosphate
  modified_base 16: mod_base = OTHER; note = 2'-O-methyladenosine-3'-phosphate
  modified_base 17: mod_base = OTHER; note = 2'-O-methyluridine-3'-phosphate
  modified_base 18: mod_base = OTHER; note = 2'-O-methyluridine-3'-phosphate
  modified_base 19: mod_base = OTHER; note = 2'-O-methylcytidine-3'-phosphate
  modified_base 20: mod_base = OTHER; note = 2'-O-methylguanosine-3'-phosphate
  modified_base 21: mod_base = OTHER; note = 2'-O-methyluridine-3'-phosphate ((2S,4R)-1-[29-[[2-(acetylamino)-2-deoxy-beta-D-galactopyra nosyl]oxy]-14,14-bis[[3-[[3-[[5-[[2-(acetylamino)-2-deoxy-b eta-D-galactopyranosyl]oxy]-1-oxopentyl]amino]propyl]amino] -3-oxopropoxy]methyl]-1,12,19,25-tetraoxo-16-oxa-13,20,24-t riazanonacos-1-yl]-4-hydroxy-2-pyrrolidinyl)methyl ester
gcaggaagcactgagattcgt

SEQ ID NO: 243 - RNA, 21 nt, synthetic construct
  source 1..21: mol_type = other RNA
  modified_base 1: mod_base = OTHER; note = 2'-O-methylcytidine-3'-phosphorothioate
  modified_base 2: mod_base = OTHER; note = 2'-O-methyluridine-3'-phosphorothioate
  modified_base 3: mod_base = OTHER; note = 2'-O-methylcytidine-3'-phosphate
  modified_base 4: mod_base = OTHER; note = 2'-O-methylguanosine-3'-phosphate
  modified_base 5: mod_base = OTHER; note = 2'-O-methyladenosine-3'-phosphate
  modified_base 6: mod_base = OTHER; note = 2'-O-methylguanosine-3'-phosphate
  modified_base 7: mod_base = OTHER; note = 2'-deoxy-2'-fluoroadenosine-3'-phosphate
  modified_base 8: mod_base = OTHER; note = 2'-O-methyluridine-3'-phosphate
  modified_base 9: mod_base = OTHER; note = 2'-deoxy-2'-fluorocytidine-3'-phosphate
  modified_base 10: mod_base = OTHER; note = 2'-deoxy-2'-fluoroguanosine-3'-phosphate
  modified_base 11: mod_base = OTHER; note = 2'-deoxy-2'-fluorocytidine-3'-phosphate
  modified_base 12: mod_base = OTHER; note = 2'-O-methyluridine-3'-phosphate
  modified_base 13: mod_base = OTHER; note = 2'-O-methyluridine-3'-phosphate
  modified_base 14: mod_base = OTHER; note = 2'-O-methyladenosine-3'-phosphate
  modified_base 15: mod_base = OTHER; note = 2'-O-methylguanosine-3'-phosphate
  modified_base 16: mod_base = OTHER; note = 2'-O-methylcytidine-3'-phosphate
  modified_base 17: mod_base = OTHER; note = 2'-O-methylcytidine-3'-phosphate
  modified_base 18: mod_base = OTHER; note = 2'-O-methylguanosine-3'-phosphate
  modified_base 19: mod_base = OTHER; note = 2'-O-methylcytidine-3'-phosphate
  modified_base 20: mod_base = OTHER; note = 2'-O-methylguanosine-3'-phosphate
  modified_base 21: mod_base = OTHER; note = 2'-O-methyluridine-3'-phosphate ((2S,4R)-1-[29-[[2-(acetylamino)-2-deoxy-beta-D-galactopyra nosyl]oxy]-14,14-bis[[3-[[3-[[5-[[2-(acetylamino)-2-deoxy-b eta-D-galactopyranosyl]oxy]-1-oxopentyl]amino]propyl]amino] -3-oxopropoxy]methyl]-1,12,19,25-tetraoxo-16-oxa-13,20,24-t riazanonacos-1-yl]-4-hydroxy-2-pyrrolidinyl)methyl ester
ctcgagatcgcttagccgcgt

SEQ ID NO: 244 - RNA, 21 nt, synthetic construct
  source 1..21: mol_type = other RNA
  modified_base 1: mod_base = OTHER; note = 2'-O-methylguanosine-3'-phosphorothioate
  modified_base 2: mod_base = OTHER; note = 2'-O-methylguanosine-3'-phosphorothioate
  modified_base 3: mod_base = OTHER; note = 2'-O-methyladenosine-3'-phosphate
  modified_base 4: mod_base = OTHER; note = 2'-O-methylguanosine-3'-phosphate
  modified_base 5: mod_base = OTHER; note = 2'-O-methyladenosine-3'-phosphate
  modified_base 6: mod_base = OTHER; note = 2'-O-methylcytidine-3'-phosphate
  modified_base 7: mod_base = OTHER; note = 2'-deoxy-2'-fluoroadenosine-3'-phosphate
  modified_base 8: mod_base = OTHER; note = 2'-O-methylcytidine-3'-phosphate
  modified_base 9: mod_base = OTHER; note = 2'-deoxy-2'-fluorocytidine-3'-phosphate
  modified_base 10: mod_base = OTHER; note = 2'-deoxy-2'-fluorouridine-3'-phosphate
  modified_base 11: mod_base = OTHER; note = 2'-deoxy-2'-fluorouridine-3'-phosphate
  modified_base 12: mod_base = OTHER; note = 2'-O-methylcytidine-3'-phosphate
  modified_base 13: mod_base = OTHER; note = 2'-O-methyladenosine-3'-phosphate
  modified_base 14: mod_base = OTHER; note = 2'-O-methyladenosine-3'-phosphate
  modified_base 15: mod_base = OTHER; note = 2'-O-methyluridine-3'-phosphate
  modified_base 16: mod_base = OTHER; note = 2'-O-methylguanosine-3'-phosphate
  modified_base 17: mod_base = OTHER; note = 2'-O-methylcytidine-3'-phosphate
  modified_base 18: mod_base = OTHER; note = 2'-O-methylcytidine-3'-phosphate
  modified_base 19: mod_base = OTHER; note = 2'-O-methyluridine-3'-phosphate
  modified_base 20: mod_base = OTHER; note = 2'-O-methylcytidine-3'-phosphate
  modified_base 21: mod_base = OTHER; note = 2'-O-methyluridine-3'-phosphate ((2S,4R)-1-[29-[[2-(acetylamino)-2-deoxy-beta-D-galactopyra nosyl]oxy]-14,14-bis[[3-[[3-[[5-[[2-(acetylamino)-2-deoxy-b eta-D-galactopyranosyl]oxy]-1-oxopentyl]amino]propyl]amino] -3-oxopropoxy]methyl]-1,12,19,25-tetraoxo-16-oxa-13,20,24-t riazanonacos-1-yl]-4-hydroxy-2-pyrrolidinyl)methyl ester
ggagacaccttcaatgcctct

SEQ ID NO: 245 - RNA, 21 nt, synthetic construct
  source 1..21: mol_type = other RNA
  modified_base 1: mod_base = OTHER; note = 2'-O-methylcytidine-3'-phosphorothioate
  modified_base 2: mod_base = OTHER; note = 2'-O-methyluridine-3'-phosphorothioate
  modified_base 3: mod_base = OTHER; note = 2'-O-methyluridine-3'-phosphate
  modified_base 4: mod_base = OTHER; note = 2'-O-methyluridine-3'-phosphate
  modified_base 5: mod_base = OTHER; note = 2'-O-methylguanosine-3'-phosphate
  modified_base 6: mod_base = OTHER; note = 2'-O-methylcytidine-3'-phosphate
  modified_base 7: mod_base = OTHER; note = 2'-deoxy-2'-fluoroadenosine-3'-phosphate
  modified_base 8: mod_base = OTHER; note = 2'-O-methyluridine-3'-phosphate
  modified_base 9: mod_base = OTHER; note = 2'-deoxy-2'-fluorouridine-3'-phosphate
  modified_base 10: mod_base = OTHER; note = 2'-deoxy-2'-fluorocytidine-3'-phosphate
  modified_base 11: mod_base = OTHER; note = 2'-deoxy-2'-fluorouridine-3'-phosphate
  modified_base 12: mod_base = OTHER; note = 2'-O-methylcytidine-3'-phosphate
  modified_base 13: mod_base = OTHER; note = 2'-O-methylguanosine-3'-phosphate
  modified_base 14: mod_base = OTHER; note = 2'-O-methyladenosine-3'-phosphate
  modified_base 15: mod_base = OTHER; note = 2'-O-methylguanosine-3'-phosphate
  modified_base 16: mod_base = OTHER; note = 2'-O-methyladenosine-3'-phosphate
  modified_base 17: mod_base = OTHER; note = 2'-O-methyluridine-3'-phosphate
  modified_base 18: mod_base = OTHER; note = 2'-O-methylcytidine-3'-phosphate
  modified_base 19: mod_base = OTHER; note = 2'-O-methylguanosine-3'-phosphate
  modified_base 20: mod_base = OTHER; note = 2'-O-methylcytidine-3'-phosphate
  modified_base 21: mod_base = OTHER; note = 2'-O-methyluridine-3'-phosphate ((2S,4R)-1-[29-[[2-(acetylamino)-2-deoxy-beta-D-galactopyra nosyl]oxy]-14,14-bis[[3-[[3-[[5-[[2-(acetylamino)-2-deoxy-b eta-D-galactopyranosyl]oxy]-1-oxopentyl]amino]propyl]amino] -3-oxopropoxy]methyl]-1,12,19,25-tetraoxo-16-oxa-13,20,24-t riazanonacos-1-yl]-4-hydroxy-2-pyrrolidinyl)methyl ester
ctttgcattctcgagatcgct

SEQ ID NO: 246 - RNA, 21 nt, synthetic construct
  source 1..21: mol_type = other RNA
  modified_base 1: mod_base = OTHER; note = 2'-O-methyluridine-3'-phosphorothioate
  modified_base 2: mod_base = OTHER; note = 2'-O-methylguanosine-3'-phosphorothioate
  modified_base 3: mod_base = OTHER; note = 2'-O-methylguanosine-3'-phosphate
  modified_base 4: mod_base = OTHER; note = 2'-O-methyladenosine-3'-phosphate
  modified_base 5: mod_base = OTHER; note = 2'-O-methyluridine-3'-phosphate
  modified_base 6: mod_base = OTHER; note = 2'-O-methylcytidine-3'-phosphate
  modified_base 7: mod_base = OTHER; note = 2'-deoxy-2'-fluorocytidine-3'-phosphate
  modified_base 8: mod_base = OTHER; note = 2'-O-methyladenosine-3'-phosphate
  modified_base 9: mod_base = OTHER; note = 2'-deoxy-2'-fluorocytidine-3'-phosphate
  modified_base 10: mod_base = OTHER; note = 2'-deoxy-2'-fluoroadenosine-3'-phosphate
  modified_base 11: mod_base = OTHER; note = 2'-deoxy-2'-fluorouridine-3'-phosphate
  modified_base 12: mod_base = OTHER; note = 2'-O-methyluridine-3'-phosphate
  modified_base 13: mod_base = OTHER; note = 2'-O-methylguanosine-3'-phosphate
  modified_base 14: mod_base = OTHER; note = 2'-O-methyladenosine-3'-phosphate
  modified_base 15: mod_base = OTHER; note = 2'-O-methylguanosine-3'-phosphate
  modified_base 16: mod_base = OTHER; note = 2'-O-methylguanosine-3'-phosphate
  modified_base 17: mod_base = OTHER; note = 2'-O-methylguanosine-3'-phosphate
  modified_base 18: mod_base = OTHER; note = 2'-O-methylcytidine-3'-phosphate
  modified_base 19: mod_base = OTHER; note = 2'-O-methylcytidine-3'-phosphate
  modified_base 20: mod_base = OTHER; note = 2'-O-methylguanosine-3'-phosphate
  modified_base 21: mod_base = OTHER; note = 2'-O-methyluridine-3'-phosphate ((2S,4R)-1-[29-[[2-(acetylamino)-2-deoxy-beta-D-galactopyra nosyl]oxy]-14,14-bis[[3-[[3-[[5-[[2-(acetylamino)-2-deoxy-b eta-D-galactopyranosyl]oxy]-1-oxopentyl]amino]propyl]amino] -3-oxopropoxy]methyl]-1,12,19,25-tetraoxo-16-oxa-13,20,24-t riazanonacos-1-yl]-4-hydroxy-2-pyrrolidinyl)methyl ester
tggatccacattgagggccgt

SEQ ID NO: 247 - RNA, 21 nt, synthetic construct
  source 1..21: mol_type = other RNA
  modified_base 1: mod_base = OTHER; note = 2'-O-methylcytidine-3'-phosphorothioate
  modified_base 2: mod_base = OTHER; note = 2'-O-methyluridine-3'-phosphorothioate
  modified_base 3: mod_base = OTHER; note = 2'-O-methylguanosine-3'-phosphate
  modified_base 4: mod_base = OTHER; note = 2'-O-methylcytidine-3'-phosphate
  modified_base 5: mod_base = OTHER; note = 2'-O-methylcytidine-3'-phosphate
  modified_base 6: mod_base = OTHER; note = 2'-O-methyladenosine-3'-phosphate
  modified_base 7: mod_base = OTHER; note = 2'-deoxy-2'-fluoroguanosine-3'-phosphate
  modified_base 8: mod_base = OTHER; note = 2'-O-methyladenosine-3'-phosphate
  modified_base 9: mod_base = OTHER; note = 2'-deoxy-2'-fluorouridine-3'-phosphate
  modified_base 10: mod_base = OTHER; note = 2'-deoxy-2'-fluoroguanosine-3'-phosphate
  modified_base 11: mod_base = OTHER; note = 2'-deoxy-2'-fluorouridine-3'-phosphate
  modified_base 12: mod_base = OTHER; note = 2'-O-methylguanosine-3'-phosphate
  modified_base 13: mod_base = OTHER; note = 2'-O-methyluridine-3'-phosphate
  modified_base 14: mod_base = OTHER; note = 2'-O-methylcytidine-3'-phosphate
  modified_base 15: mod_base = OTHER; note = 2'-O-methyluridine-3'-phosphate
  modified_base 16: mod_base = OTHER; note = 2'-O-methylguanosine-3'-phosphate
  modified_base 17: mod_base = OTHER; note = 2'-O-methylcytidine-3'-phosphate
  modified_base 18: mod_base = OTHER; note = 2'-O-methyluridine-3'-phosphate
  modified_base 19: mod_base = OTHER; note = 2'-O-methyladenosine-3'-phosphate
  modified_base 20: mod_base = OTHER; note = 2'-O-methylcytidine-3'-phosphate
  modified_base 21: mod_base = OTHER; note = 2'-O-methyladenosine-3'-phosphate ((2S,4R)-1-[29-[[2-(acetylamino)-2-deoxy-beta-D-galactopyra nosyl]oxy]-14,14-bis[[3-[[3-[[5-[[2-(acetylamino)-2-deoxy-b eta-D-galactopyranosyl]oxy]-1-oxopentyl]amino]propyl]amino] -3-oxopropoxy]methyl]-1,12,19,25-tetraoxo-16-oxa-13,20,24-t riazanonacos-1-yl]-4-hydroxy-2-pyrrolidinyl)methyl ester
ctgccagatgtgtctgctaca

SEQ ID NO: 248 - RNA, 23 nt, synthetic construct
  source 1..23: mol_type = other RNA
  modified_base 1: mod_base = OTHER; note = 2'-O-methyladenosine-3'-phosphorothioate
  modified_base 2: mod_base = OTHER; note = 2'-deoxy-2'-fluorouridine-3'-phosphorothioate
  modified_base 3: mod_base = OTHER; note = 2'-O-methylcytidine-3'-phosphate
  modified_base 4: mod_base = OTHER; note = 2'-O-methyluridine-3'-phosphate
  modified_base 5: mod_base = OTHER; note = 2'-O-methylcytidine-3'-phosphate
  modified_base 6: mod_base = OTHER; note = 2'-O-methylguanosine-3'-phosphate
  modified_base 7: mod_base = OTHER; note = Adenosine-glycol nucleic acid (GNA), S-isomer
  modified_base 8: mod_base = OTHER; note = 2'-O-methylguanosine-3'-phosphate
  modified_base 9: mod_base = OTHER; note = 2'-O-methyladenosine-3'-phosphate
  modified_base 10: mod_base = OTHER; note = 2'-O-methyladenosine-3'-phosphate
  modified_base 11: mod_base = OTHER; note = 2'-O-methyluridine-3'-phosphate
  modified_base 12: mod_base = OTHER; note = 2'-O-methylguanosine-3'-phosphate
  modified_base 13: mod_base = OTHER; note = 2'-O-methylcytidine-3'-phosphate
  modified_base 14: mod_base = OTHER; note = 2'-deoxy-2'-fluoroadenosine-3'-phosphate
  modified_base 15: mod_base = OTHER; note = 2'-O-methyladenosine-3'-phosphate
  modified_base 16: mod_base = OTHER; note = 2'-deoxy-2'-fluoroadenosine-3'-phosphate
  modified_base 17: mod_base = OTHER; note = 2'-O-methylguanosine-3'-phosphate
  modified_base 18: mod_base = OTHER; note = 2'-O-methyladenosine-3'-phosphate
  modified_base 19: mod_base = OTHER; note = 2'-O-methylguanosine-3'-phosphate
  modified_base 20: mod_base = OTHER; note = 2'-O-methyladenosine-3'-phosphate
  modified_base 21: mod_base = OTHER; note = 2'-O-methyladenosine-3'-phosphorothioate
  modified_base 22: mod_base = OTHER; note = 2'-O-methyladenosine-3'-phosphorothioate
  modified_base 23: mod_base = OTHER; note = 2'-O-methyladenosine
atctcgagaatgcaaagagaaaa

SEQ ID NO: 249 - RNA, 23 nt, synthetic construct
  source 1..23: mol_type = other RNA
  modified_base 1: mod_base = OTHER; note = 2'-O-methyladenosine-3'-phosphorothioate
  modified_base 2: mod_base = OTHER; note = 2'-deoxy-2'-fluorouridine-3'-phosphorothioate
  modified_base 3: mod_base = OTHER; note = 2'-O-methyladenosine-3'-phosphate
  modified_base 4: mod_base = OTHER; note = 2'-O-methylguanosine-3'-phosphate
  modified_base 5: mod_base = OTHER; note = 2'-O-methyladenosine-3'-phosphate
  modified_base 6: mod_base = OTHER; note = 2'-O-methylguanosine-3'-phosphate
  modified_base 7: mod_base = OTHER; note = Thymidine-glycol nucleic acid (GNA), S-Isomer
  modified_base 8: mod_base = OTHER; note = 2'-O-methylcytidine-3'-phosphate
  modified_base 9: mod_base = OTHER; note = 2'-O-methyluridine-3'-phosphate
  modified_base 10: mod_base = OTHER; note = 2'-O-methylguanosine-3'-phosphate
  modified_base 11: mod_base = OTHER; note = 2'-O-methylcytidine-3'-phosphate
  modified_base 12: mod_base = OTHER; note = 2'-O-methyladenosine-3'-phosphate
  modified_base 13: mod_base = OTHER; note = 2'-O-methylcytidine-3'-phosphate
  modified_base 14: mod_base = OTHER; note = 2'-deoxy-2'-fluoroadenosine-3'-phosphate
  modified_base 15: mod_base = OTHER; note = 2'-O-methyladenosine-3'-phosphate
  modified_base 16: mod_base = OTHER; note = 2'-deoxy-2'-fluorocytidine-3'-phosphate
  modified_base 17: mod_base = OTHER; note = 2'-O-methylguanosine-3'-phosphate
  modified_base 18: mod_base = OTHER; note = 2'-O-methylcytidine-3'-phosphate
  modified_base 19: mod_base = OTHER; note = 2'-O-methyladenosine-3'-phosphate
  modified_base 20: mod_base = OTHER; note = 2'-O-methylguanosine-3'-phosphate
  modified_base 21: mod_base = OTHER; note = 2'-O-methylguanosine-3'-phosphorothioate
  modified_base 22: mod_base = OTHER; note = 2'-O-methylguanosine-3'-phosphorothioate
  modified_base 23: mod_base = OTHER; note = 2'-O-methylcytidine
atagagtctgcacaacgcagggc

SEQ ID NO: 250 - RNA, 23 nt, synthetic construct
  source 1..23: mol_type = other RNA
  modified_base 1: mod_base = OTHER; note = 2'-O-methyluridine-3'-phosphorothioate
  modified_base 2: mod_base = OTHER; note = 2'-deoxy-2'-fluoroadenosine-3'-phosphorothioate
  modified_base 3: mod_base = OTHER; note = 2'-O-methyladenosine-3'-phosphate
  modified_base 4: mod_base = OTHER; note = 2'-O-methyladenosine-3'-phosphate
  modified_base 5: mod_base = OTHER; note = 2'-O-methylguanosine-3'-phosphate
  modified_base 6: mod_base = OTHER; note = 2'-O-methylcytidine-3'-phosphate
  modified_base 7: mod_base = OTHER; note = Guanosine-glycol nucleic acid (GNA), S-isomer
  modified_base 8: mod_base = OTHER; note = 2'-O-methylcytidine-3'-phosphate
  modified_base 9: mod_base = OTHER; note = 2'-O-methylguanosine-3'-phosphate
  modified_base 10: mod_base = OTHER; note = 2'-O-methylguanosine-3'-phosphate
  modified_base 11: mod_base = OTHER; note = 2'-O-methylcytidine-3'-phosphate
  modified_base 12: mod_base = OTHER; note = 2'-O-methyluridine-3'-phosphate
  modified_base 13: mod_base = OTHER; note = 2'-O-methyladenosine-3'-phosphate
  modified_base 14: mod_base = OTHER; note = 2'-deoxy-2'-fluoroadenosine-3'-phosphate
  modified_base 15: mod_base = OTHER; note = 2'-O-methylguanosine-3'-phosphate
  modified_base 16: mod_base = OTHER; note = 2'-deoxy-2'-fluorocytidine-3'-phosphate
  modified_base 17: mod_base = OTHER; note = 2'-O-methylguanosine-3'-phosphate
  modified_base 18: mod_base = OTHER; note = 2'-O-methyladenosine-3'-phosphate
  modified_base 19: mod_base = OTHER; note = 2'-O-methyluridine-3'-phosphate
  modified_base 20: mod_base = OTHER; note = 2'-O-methylcytidine-3'-phosphate
  modified_base 21: mod_base = OTHER; note = 2'-O-methyluridine-3'-phosphorothioate
  modified_base 22: mod_base = OTHER; note = 2'-O-methylcytidine-3'-phosphorothioate
  modified_base 23: mod_base = OTHER; note = 2'-O-methylguanosine
taaagcgcggctaagcgatctcg

SEQ ID NO: 251 - RNA, 23 nt, synthetic construct
  source 1..23: mol_type = other RNA
  modified_base 1: mod_base = OTHER; note = 2'-O-methyluridine-3'-phosphorothioate
  modified_base 2: mod_base = OTHER; note = 2'-deoxy-2'-fluorocytidine-3'-phosphorothioate
  modified_base 3: mod_base = OTHER; note = 2'-O-methyluridine-3'-phosphate
  modified_base 4: mod_base = OTHER; note = 2'-O-methylcytidine-3'-phosphate
  modified_base 5: mod_base = OTHER; note = 2'-O-methylguanosine-3'-phosphate
  modified_base 6: mod_base = OTHER; note = 2'-O-methyladenosine-3'-phosphate
  modified_base 7: mod_base = OTHER; note = Guanosine-glycol nucleic acid (GNA), S-isomer
  modified_base 8: mod_base = OTHER; note = 2'-O-methyladenosine-3'-phosphate
  modified_base 9: mod_base = OTHER; note = 2'-O-methyladenosine-3'-phosphate
  modified_base 10: mod_base = OTHER; note = 2'-O-methyluridine-3'-phosphate
  modified_base 11: mod_base = OTHER; note = 2'-O-methylguanosine-3'-phosphate
  modified_base 12: mod_base = OTHER; note = 2'-O-methylcytidine-3'-phosphate
  modified_base 13: mod_base = OTHER; note = 2'-O-methyladenosine-3'-phosphate
  modified_base 14: mod_base = OTHER; note = 2'-deoxy-2'-fluoroadenosine-3'-phosphate
  modified_base 15: mod_base = OTHER; note = 2'-O-methyladenosine-3'-phosphate
  modified_base 16: mod_base = OTHER; note = 2'-deoxy-2'-fluoroguanosine-3'-phosphate
  modified_base 17: mod_base = OTHER; note = 2'-O-methyladenosine-3'-phosphate
  modified_base 18: mod_base = OTHER; note = 2'-O-methylguanosine-3'-phosphate
  modified_base 19: mod_base = OTHER; note = 2'-O-methyladenosine-3'-phosphate
  modified_base 20: mod_base = OTHER; note = 2'-O-methyladenosine-3'-phosphate
  modified_base 21: mod_base = OTHER; note = 2'-O-methyladenosine-3'-phosphorothioate
  modified_base 22: mod_base = OTHER; note = 2'-O-methyladenosine-3'-phosphorothioate
  modified_base 23: mod_base = OTHER; note = 2'-O-methyluridine
tctcgagaatgcaaagagaaaat

SEQ ID NO: 252 - RNA, 23 nt, synthetic construct
  source 1..23: mol_type = other RNA
  modified_base 1: mod_base = OTHER; note = 2'-O-methyluridine-3'-phosphorothioate
  modified_base 2: mod_base = OTHER; note = 2'-deoxy-2'-fluorocytidine-3'-phosphorothioate
  modified_base 3: mod_base = OTHER; note = 2'-O-methylguanosine-3'-phosphate
  modified_base 4: mod_base = OTHER; note = 2'-O-methylcytidine-3'-phosphate
  modified_base 5: mod_base = OTHER; note = 2'-O-methyluridine-3'-phosphate
  modified_base 6: mod_base = OTHER; note = 2'-O-methyluridine-3'-phosphate
  modified_base 7: mod_base = OTHER; note = Guanosine-glycol nucleic acid (GNA), S-isomer
  modified_base 8: mod_base = OTHER; note = 2'-O-methyluridine-3'-phosphate
  modified_base 9: mod_base = OTHER; note = 2'-O-methylcytidine-3'-phosphate
  modified_base 10: mod_base = OTHER; note = 2'-O-methyladenosine-3'-phosphate
  modified_base 11: mod_base = OTHER; note = 2'-O-methylguanosine-3'-phosphate
  modified_base 12: mod_base = OTHER; note = 2'-O-methyladenosine-3'-phosphate
  modified_base 13: mod_base = OTHER; note = 2'-O-methyluridine-3'-phosphate
  modified_base 14: mod_base = OTHER; note = 2'-deoxy-2'-fluoroguanosine-3'-phosphate
  modified_base 15: mod_base = OTHER; note = 2'-O-methylguanosine-3'-phosphate
  modified_base 16: mod_base = OTHER; note = 2'-deoxy-2'-fluoroadenosine-3'-phosphate
  modified_base 17: mod_base = OTHER; note = 2'-O-methylcytidine-3'-phosphate
  modified_base 18: mod_base = OTHER; note = 2'-O-methyluridine-3'-phosphate
  modified_base 19: mod_base = OTHER; note = 2'-O-methylcytidine-3'-phosphate
  modified_base 20: mod_base = OTHER; note = 2'-O-methyladenosine-3'-phosphate
  modified_base 21: mod_base = OTHER; note = 2'-O-methylcytidine-3'-phosphorothioate
  modified_base 22: mod_base = OTHER; note = 2'-O-methyladenosine-3'-phosphorothioate
  modified_base 23: mod_base = OTHER; note = 2'-O-methylguanosine
tcgcttgtcagatggactcacag

SEQ ID NO: 253 - RNA, 23 nt, synthetic construct
  source 1..23: mol_type = other RNA
  modified_base 1: mod_base = OTHER; note = 2'-O-methyladenosine-3'-phosphorothioate
  modified_base 2: mod_base = OTHER; note = 2'-deoxy-2'-fluoroguanosine-3'-phosphorothioate
  modified_base 3: mod_base = OTHER; note = 2'-O-methyladenosine-3'-phosphate
  modified_base 4: mod_base = OTHER; note = 2'-O-methylguanosine-3'-phosphate
  modified_base 5: mod_base = OTHER; note = 2'-O-methyladenosine-3'-phosphate
  modified_base 6: mod_base = OTHER; note = 2'-O-methyladenosine-3'-phosphate
  modified_base 7: mod_base = OTHER; note = Cytidine-glycol nucleic acid (GNA), S-isomer
  modified_base 8: mod_base = OTHER; note = 2'-O-methylguanosine-3'-phosphate
  modified_base 9: mod_base = OTHER; note = 2'-O-methylguanosine-3'-phosphate
  modified_base 10: mod_base = OTHER; note = 2'-O-methyluridine-3'-phosphate
  modified_base 11: mod_base = OTHER; note = 2'-O-methylguanosine-3'-phosphate
  modified_base 12: mod_base = OTHER; note = 2'-O-methylcytidine-3'-phosphate
  modified_base 13: mod_base = OTHER; note = 2'-O-methyladenosine-3'-phosphate
  modified_base 14: mod_base = OTHER; note = 2'-deoxy-2'-fluoroguanosine-3'-phosphate
  modified_base 15: mod_base = OTHER; note = 2'-O-methylguanosine-3'-phosphate
  modified_base 16: mod_base = OTHER; note = 2'-deoxy-2'-fluoroadenosine-3'-phosphate
  modified_base 17: mod_base = OTHER; note = 2'-O-methylguanosine-3'-phosphate
  modified_base 18: mod_base = OTHER; note = 2'-O-methyluridine-3'-phosphate
  modified_base 19: mod_base = OTHER; note = 2'-O-methyluridine-3'-phosphate
  modified_base 20: mod_base = OTHER; note = 2'-O-methylguanosine-3'-phosphate
  modified_base 21: mod_base = OTHER; note = 2'-O-methylguanosine-3'-phosphorothioate
  modified_base 22: mod_base = OTHER; note = 2'-O-methyladenosine-3'-phosphorothioate
  modified_base 23: mod_base = OTHER; note = 2'-O-methylcytidine
agagaacggtgcaggagttggac

SEQ ID NO: 254 - RNA, 23 nt, synthetic construct
  source 1..23: mol_type = other RNA
  modified_base 1: mod_base = OTHER; note = 2'-O-methyluridine-3'-phosphorothioate
  modified_base 2: mod_base = OTHER; note = 2'-deoxy-2'-fluorouridine-3'-phosphorothioate
  modified_base 3: mod_base = OTHER; note = 2'-O-methylcytidine-3'-phosphate
  modified_base 4: mod_base = OTHER; note = 2'-O-methylcytidine-3'-phosphate
  modified_base 5: mod_base = OTHER; note = 2'-O-methyluridine-3'-phosphate
  modified_base 6: mod_base = OTHER; note = 2'-O-methylcytidine-3'-phosphate
  modified_base 7: mod_base = OTHER; note = Adenosine-glycol nucleic acid (GNA), S-isomer
  modified_base 8: mod_base = OTHER; note = 2'-O-methylcytidine-3'-phosphate
  modified_base 9: mod_base = OTHER; note = 2'-O-methyladenosine-3'-phosphate
  modified_base 10: mod_base = OTHER; note = 2'-O-methylcytidine-3'-phosphate
  modified_base 11: mod_base = OTHER; note = 2'-O-methylguanosine-3'-phosphate
  modified_base 12: mod_base = OTHER; note = 2'-O-methyladenosine-3'-phosphate
  modified_base 13: mod_base = OTHER; note = 2'-O-methylcytidine-3'-phosphate
  modified_base 14: mod_base = OTHER; note = 2'-deoxy-2'-fluorocytidine-3'-phosphate
  modified_base 15: mod_base = OTHER; note = 2'-O-methyladenosine-3'-phosphate
  modified_base 16: mod_base = OTHER; note = 2'-deoxy-2'-fluorouridine-3'-phosphate
  modified_base 17: mod_base = OTHER; note = 2'-O-methyladenosine-3'-phosphate
  modified_base 18: mod_base = OTHER; note = 2'-O-methylcytidine-3'-phosphate
  modified_base 19: mod_base = OTHER; note = 2'-O-methyladenosine-3'-phosphate
  modified_base 20: mod_base = OTHER; note = 2'-O-methyladenosine-3'-phosphate
  modified_base 21: mod_base = OTHER; note = 2'-O-methylguanosine-3'-phosphorothioate
  modified_base 22: mod_base = OTHER; note = 2'-O-methylcytidine-3'-phosphorothioate
  modified_base 23: mod_base = OTHER; note = 2'-O-methylcytidine
ttcctcacacgaccatacaagcc

SEQ ID NO: 255 - RNA, 23 nt, synthetic construct
  source 1..23: mol_type = other RNA
  modified_base 1: mod_base = OTHER; note = 2'-O-methyluridine-3'-phosphorothioate
  modified_base 2: mod_base = OTHER; note = 2'-deoxy-2'-fluorouridine-3'-phosphorothioate
  modified_base 3: mod_base = OTHER; note = 2'-O-methylcytidine-3'-phosphate
  modified_base 4: mod_base = OTHER; note = 2'-O-methylcytidine-3'-phosphate
  modified_base 5: mod_base = OTHER; note = 2'-O-methylguanosine-3'-phosphate
  modified_base 6: mod_base = OTHER; note = 2'-O-methylguanosine-3'-phosphate
  modified_base 7: mod_base = OTHER; note = Cytidine-glycol nucleic acid (GNA), S-isomer
  modified_base 8: mod_base = OTHER; note = 2'-O-methylcytidine-3'-phosphate
  modified_base 9: mod_base = OTHER; note = 2'-O-methylcytidine-3'-phosphate
  modified_base 10: mod_base = OTHER; note = 2'-O-methyluridine-3'-phosphate
  modified_base 11: mod_base = OTHER; note = 2'-O-methylcytidine-3'-phosphate
  modified_base 12: mod_base = OTHER; note = 2'-O-methyladenosine-3'-phosphate
  modified_base 13: mod_base = OTHER; note = 2'-O-methyladenosine-3'-phosphate
  modified_base 14: mod_base = OTHER; note = 2'-deoxy-2'-fluorouridine-3'-phosphate
  modified_base 15: mod_base = OTHER; note = 2'-O-methylguanosine-3'-phosphate
  modified_base 16: mod_base = OTHER; note = 2'-deoxy-2'-fluorouridine-3'-phosphate
  modified_base 17: mod_base = OTHER; note = 2'-O-methylguanosine-3'-phosphate
  modified_base 18: mod_base = OTHER; note = 2'-O-methylguanosine-3'-phosphate
  modified_base 19: mod_base = OTHER; note = 2'-O-methyladenosine-3'-phosphate
  modified_base 20: mod_base = OTHER; note = 2'-O-methyluridine-3'-phosphate
  modified_base 21: mod_base = OTHER; note = 2'-O-methylcytidine-3'-phosphorothioate
  modified_base 22: mod_base = OTHER; note = 2'-O-methylcytidine-3'-phosphorothioate
  modified_base 23: mod_base = OTHER; note = 2'-O-methyladenosine
ttccggccctcaatgtggatcca

SEQ ID NO: 256 - RNA, 23 nt, synthetic construct
  source 1..23: mol_type = other RNA
  modified_base 1: mod_base = OTHER; note = 2'-O-methyladenosine-3'-phosphorothioate
  modified_base 2: mod_base = OTHER; note = 2'-deoxy-2'-fluorocytidine-3'-phosphorothioate
  modified_base 3: mod_base = OTHER; note = 2'-O-methylguanosine-3'-phosphate
  modified_base 4: mod_base = OTHER; note = 2'-O-methyluridine-3'-phosphate
  modified_base 5: mod_base = OTHER; note = 2'-O-methylcytidine-3'-phosphate
  modified_base 6: mod_base = OTHER; note = 2'-O-methyluridine-3'-phosphate
  modified_base 7: mod_base = OTHER; note = Cytidine-glycol nucleic acid (GNA), S-isomer
  modified_base 8: mod_base = OTHER; note = 2'-O-methylcytidine-3'-phosphate
  modified_base 9: mod_base = OTHER; note = 2'-O-methylguanosine-3'-phosphate
  modified_base 10: mod_base = OTHER; note = 2'-O-methyluridine-3'-phosphate
  modified_base 11: mod_base = OTHER; note = 2'-O-methyladenosine-3'-phosphate
  modified_base 12: mod_base = OTHER; note = 2'-O-methylguanosine-3'-phosphate
  modified_base 13: mod_base = OTHER; note = 2'-O-methylcytidine-3'-phosphate
  modified_base 14: mod_base = OTHER; note = 2'-deoxy-2'-fluorocytidine-3'-phosphate
  modified_base 15: mod_base = OTHER; note = 2'-O-methyladenosine-3'-phosphate
  modified_base 16: mod_base = OTHER; note = 2'-deoxy-2'-fluoroadenosine-3'-phosphate
  modified_base 17: mod_base = OTHER; note = 2'-O-methyladenosine-3'-phosphate
  modified_base 18: mod_base = OTHER; note = 2'-O-methylcytidine-3'-phosphate
  modified_base 19: mod_base = OTHER; note = 2'-O-methyladenosine-3'-phosphate
  modified_base 20: mod_base = OTHER; note = 2'-O-methylguanosine-3'-phosphate
  modified_base 21: mod_base = OTHER; note = 2'-O-methylcytidine-3'-phosphorothioate
  modified_base 22: mod_base = OTHER; note = 2'-O-methyluridine-3'-phosphorothioate
  modified_base 23: mod_base = OTHER; note = 2'-O-methylguanosine
acgtctccgtagccaaacagctg

SEQ ID NO: 257 - RNA, 23 nt, synthetic construct
  source 1..23: mol_type = other RNA
  modified_base 1: mod_base = OTHER; note = 2'-O-methyladenosine-3'-phosphorothioate
  modified_base 2: mod_base = OTHER; note = 2'-deoxy-2'-fluorouridine-3'-phosphorothioate
  modified_base 3: mod_base = OTHER; note = 2'-O-methylguanosine-3'-phosphate
  modified_base 4: mod_base = OTHER; note = 2'-O-methylcytidine-3'-phosphate
  modified_base 5: mod_base = OTHER; note = 2'-O-methyladenosine-3'-phosphate
  modified_base 6: mod_base = OTHER; note = 2'-O-methylguanosine-3'-phosphate
  modified_base 7: mod_base = OTHER; note = Cytidine-glycol nucleic acid (GNA), S-isomer
  modified_base 8: mod_base = OTHER; note = 2'-O-methyluridine-3'-phosphate
  modified_base 9: mod_base = OTHER; note = 2'-O-methyladenosine-3'-phosphate
  modified_base 10: mod_base = OTHER; note = 2'-O-methyladenosine-3'-phosphate
  modified_base 11: mod_base = OTHER; note = 2'-O-methyluridine-3'-phosphate
  modified_base 12: mod_base = OTHER; note = 2'-O-methyluridine-3'-phosphate
  modified_base 13: mod_base = OTHER; note = 2'-O-methyladenosine-3'-phosphate
  modified_base 14: mod_base = OTHER; note = 2'-deoxy-2'-fluoroadenosine-3'-phosphate
  modified_base 15: mod_base = OTHER; note = 2'-O-methyladenosine-3'-phosphate
  modified_base 16: mod_base = OTHER; note = 2'-deoxy-2'-fluorouridine-3'-phosphate
  modified_base 17: mod_base = OTHER; note = 2'-O-methylguanosine-3'-phosphate
  modified_base 18: mod_base = OTHER; note = 2'-O-methylguanosine-3'-phosphate
  modified_base 19: mod_base = OTHER; note = 2'-O-methylcytidine-3'-phosphate
  modified_base 20: mod_base = OTHER; note = 2'-O-methyladenosine-3'-phosphate
  modified_base 21: mod_base = OTHER; note = 2'-O-methylguanosine-3'-phosphorothioate
  modified_base 22: mod_base = OTHER; note = 2'-O-methyladenosine-3'-phosphorothioate
  modified_base 23: mod_base = OTHER; note = 2'-O-methyluridine
atgcagctaattaaatggcagat

SEQ ID NO: 258 - RNA, 23 nt, synthetic construct
  source 1..23: mol_type = other RNA
  modified_base 1: mod_base = OTHER; note = 2'-O-methyladenosine-3'-phosphorothioate
  modified_base 2: mod_base = OTHER; note = 2'-deoxy-2'-fluoroadenosine-3'-phosphorothioate
  modified_base 3: mod_base = OTHER; note = 2'-O-methylcytidine-3'-phosphate
  modified_base 4: mod_base = OTHER; note = 2'-O-methylguanosine-3'-phosphate
  modified_base 5: mod_base = OTHER; note = 2'-O-methylcytidine-3'-phosphate
  modified_base 6: mod_base = OTHER; note = 2'-O-methyladenosine-3'-phosphate
  modified_base 7: mod_base = OTHER; note = Cytidine-glycol nucleic acid (GNA), S-isomer
  modified_base 8: mod_base = OTHER; note = 2'-O-methyladenosine-3'-phosphate
  modified_base 9: mod_base = OTHER; note = 2'-O-methylguanosine-3'-phosphate
  modified_base 10: mod_base = OTHER; note = 2'-O-methylguanosine-3'-phosphate
  modified_base 11: mod_base = OTHER; note = 2'-O-methyladenosine-3'-phosphate
  modified_base 12: mod_base = OTHER; note = 2'-O-methyluridine-3'-phosphate
  modified_base 13: mod_base = OTHER; note = 2'-O-methylcytidine-3'-phosphate
  modified_base 14: mod_base = OTHER; note = 2'-deoxy-2'-fluorouridine-3'-phosphate
  modified_base 15: mod_base = OTHER; note = 2'-O-methylguanosine-3'-phosphate
  modified_base 16: mod_base = OTHER; note = 2'-deoxy-2'-fluorocytidine-3'-phosphate
  modified_base 17: mod_base = OTHER; note = 2'-O-methyluridine-3'-phosphate
  modified_base 18: mod_base = OTHER; note = 2'-O-methyluridine-3'-phosphate
  modified_base 19: mod_base = OTHER; note = 2'-O-methylcytidine-3'-phosphate
  modified_base 20: mod_base = OTHER; note = 2'-O-methyluridine-3'-phosphate
  modified_base 21: mod_base = OTHER; note = 2'-O-methylcytidine-3'-phosphorothioate
  modified_base 22: mod_base = OTHER; note = 2'-O-methyluridine-3'-phosphorothioate
  modified_base 23: mod_base = OTHER; note = 2'-O-methyluridine
aacgcacaggatctgcttctctt

SEQ ID NO: 259 - RNA, 23 nt, synthetic construct
  source 1..23: mol_type = other RNA
  modified_base 1: mod_base = OTHER; note = 2'-O-methyladenosine-3'-phosphorothioate
  modified_base 2: mod_base = OTHER; note = 2'-deoxy-2'-fluorouridine-3'-phosphorothioate
  modified_base 3: mod_base = OTHER; note = 2'-O-methylcytidine-3'-phosphate
  modified_base 4: mod_base = OTHER; note = 2'-O-methylguanosine-3'-phosphate
  modified_base 5: mod_base = OTHER; note = 2'-O-methylcytidine-3'-phosphate
  modified_base 6: mod_base = OTHER; note = 2'-O-methyluridine-3'-phosphate
  modified_base 7: mod_base = OTHER; note = Thymidine-glycol nucleic acid (GNA), S-Isomer
  modified_base 8: mod_base = OTHER; note = 2'-O-methylguanosine-3'-phosphate
  modified_base 9: mod_base = OTHER; note = 2'-O-methyluridine-3'-phosphate
  modified_base 10: mod_base = OTHER; note = 2'-O-methylcytidine-3'-phosphate
  modified_base 11: mod_base = OTHER; note = 2'-O-methyladenosine-3'-phosphate
  modified_base 12: mod_base = OTHER; note = 2'-O-methylguanosine-3'-phosphate
  modified_base 13: mod_base = OTHER; note = 2'-O-methyladenosine-3'-phosphate
  modified_base 14: mod_base = OTHER; note = 2'-deoxy-2'-fluorouridine-3'-phosphate
  modified_base 15: mod_base = OTHER; note = 2'-O-methylguanosine-3'-phosphate
  modified_base 16: mod_base = OTHER; note = 2'-deoxy-2'-fluoroguanosine-3'-phosphate
  modified_base 17: mod_base = OTHER; note = 2'-O-methyladenosine-3'-phosphate
  modified_base 18: mod_base = OTHER; note = 2'-O-methylcytidine-3'-phosphate
  modified_base 19: mod_base = OTHER; note = 2'-O-methyluridine-3'-phosphate
  modified_base 20: mod_base = OTHER; note = 2'-O-methylcytidine-3'-phosphate
  modified_base 21: mod_base = OTHER; note = 2'-O-methyladenosine-3'-phosphorothioate
  modified_base 22: mod_base = OTHER; note = 2'-O-methylcytidine-3'-phosphorothioate
  modified_base 23: mod_base = OTHER; note = 2'-O-methyladenosine
atcgcttgtcagatggactcaca

SEQ ID NO: 260 - RNA, 23 nt, synthetic construct
  source 1..23: mol_type = other RNA
  modified_base 1: mod_base = OTHER; note = 2'-O-methyladenosine-3'-phosphorothioate
  modified_base 2: mod_base = OTHER; note = 2'-deoxy-2'-fluoroguanosine-3'-phosphorothioate
  modified_base 3: mod_base = OTHER; note = 2'-O-methylcytidine-3'-phosphate
  modified_base 4: mod_base = OTHER; note = 2'-O-methyluridine-3'-phosphate
  modified_base 5: mod_base = OTHER; note = 2'-O-methyladenosine-3'-phosphate
  modified_base 6: mod_base = OTHER; note = 2'-O-methyladenosine-3'-phosphate
  modified_base 7: mod_base = OTHER; note = Guanosine-glycol nucleic acid (GNA), S-isomer
  modified_base 8: mod_base = OTHER; note = 2'-O-methylcytidine-3'-phosphate
  modified_base 9: mod_base = OTHER; note = 2'-O-methylguanosine-3'-phosphate
  modified_base 10: mod_base = OTHER; note = 2'-O-methyladenosine-3'-phosphate
  modified_base 11: mod_base = OTHER; note = 2'-O-methyluridine-3'-phosphate
  modified_base 12: mod_base = OTHER; note = 2'-O-methylcytidine-3'-phosphate
  modified_base 13: mod_base = OTHER; note = 2'-O-methyluridine-3'-phosphate
  modified_base 14: mod_base = OTHER; note = 2'-deoxy-2'-fluorocytidine-3'-phosphate
  modified_base 15: mod_base = OTHER; note = 2'-O-methylguanosine-3'-phosphate
  modified_base 16: mod_base = OTHER; note = 2'-deoxy-2'-fluoroadenosine-3'-phosphate
  modified_base 17: mod_base = OTHER; note = 2'-O-methylguanosine-3'-phosphate
  modified_base 18: mod_base = OTHER; note = 2'-O-methyladenosine-3'-phosphate
  modified_base 19: mod_base = OTHER; note = 2'-O-methyladenosine-3'-phosphate
  modified_base 20: mod_base = OTHER; note = 2'-O-methyluridine-3'-phosphate
  modified_base 21: mod_base = OTHER; note = 2'-O-methylguanosine-3'-phosphorothioate
  modified_base 22: mod_base = OTHER; note = 2'-O-methylcytidine-3'-phosphorothioate
  modified_base 23: mod_base = OTHER; note = 2'-O-methyladenosine
agctaagcgatctcgagaatgca

SEQ ID NO: 261 - RNA, 23 nt, synthetic construct
  source 1..23: mol_type = other RNA
  modified_base 1: mod_base = OTHER; note = 2'-O-methyladenosine-3'-phosphorothioate
  modified_base 2: mod_base = OTHER; note = 2'-deoxy-2'-fluorocytidine-3'-phosphorothioate
  modified_base 3: mod_base = OTHER; note = 2'-O-methyluridine-3'-phosphate
  modified_base 4: mod_base = OTHER; note = 2'-O-methylcytidine-3'-phosphate
  modified_base 5: mod_base = OTHER; note = 2'-O-methylguanosine-3'-phosphate
  modified_base 6: mod_base = OTHER; note = 2'-O-methylcytidine-3'-phosphate
  modified_base 7: mod_base = OTHER; note = Thymidine-glycol nucleic acid (GNA), S-Isomer
  modified_base 8: mod_base = OTHER; note = 2'-O-methyluridine-3'-phosphate
  modified_base 9: mod_base = OTHER; note = 2'-O-methylguanosine-3'-phosphate
  modified_base 10: mod_base = OTHER; note = 2'-O-methyluridine-3'-phosphate
  modified_base 11: mod_base = OTHER; note = 2'-O-methylcytidine-3'-phosphate
  modified_base 12: mod_base = OTHER; note = 2'-O-methyladenosine-3'-phosphate
  modified_base 13: mod_base = OTHER; note = 2'-O-methylguanosine-3'-phosphate
  modified_base 14: mod_base = OTHER; note = 2'-deoxy-2'-fluoroadenosine-3'-phosphate
  modified_base 15: mod_base = OTHER; note = 2'-O-methyluridine-3'-phosphate
  modified_base 16: mod_base = OTHER; note = 2'-deoxy-2'-fluoroguanosine-3'-phosphate
  modified_base 17: mod_base = OTHER; note = 2'-O-methylguanosine-3'-phosphate
  modified_base 18: mod_base = OTHER; note = 2'-O-methyladenosine-3'-phosphate
  modified_base 19: mod_base = OTHER; note = 2'-O-methylcytidine-3'-phosphate
  modified_base 20: mod_base = OTHER; note = 2'-O-methyluridine-3'-phosphate
  modified_base 21: mod_base = OTHER; note = 2'-O-methylcytidine-3'-phosphorothioate
  modified_base 22: mod_base = OTHER; note = 2'-O-methyladenosine-3'-phosphorothioate
  modified_base 23: mod_base = OTHER; note = 2'-O-methylcytidine
actcgcttgtcagatggactcac

SEQ ID NO: 262 - RNA, 23 nt, synthetic construct
  source 1..23: mol_type = other RNA
  modified_base 1: mod_base = OTHER; note = 2'-O-methyladenosine-3'-phosphorothioate
  modified_base 2: mod_base = OTHER; note = 2'-deoxy-2'-fluorouridine-3'-phosphorothioate
  modified_base 3: mod_base = OTHER; note = 2'-O-methylcytidine-3'-phosphate
  modified_base 4: mod_base = OTHER; note = 2'-O-methyluridine-3'-phosphate
  modified_base 5: mod_base = OTHER; note = 2'-O-methyladenosine-3'-phosphate
  modified_base 6: mod_base = OTHER; note = 2'-O-methyluridine-3'-phosphate
  modified_base 7: mod_base = OTHER; note = Cytidine-glycol nucleic acid (GNA), S-isomer
  modified_base 8: mod_base = OTHER; note = 2'-O-methylcytidine-3'-phosphate
  modified_base 9: mod_base = OTHER; note = 2'-O-methylguanosine-3'-phosphate
  modified_base 10: mod_base = OTHER; note = 2'-O-methylcytidine-3'-phosphate
  modified_base 11: mod_base = OTHER; note = 2'-O-methyluridine-3'-phosphate
  modified_base 12: mod_base = OTHER; note = 2'-O-methylguanosine-3'-phosphate
  modified_base 13: mod_base = OTHER; note = 2'-O-methylcytidine-3'-phosphate
  modified_base 14: mod_base = OTHER; note = 2'-deoxy-2'-fluoroadenosine-3'-phosphate
  modified_base 15: mod_base = OTHER; note = 2'-O-methylguanosine-3'-phosphate
  modified_base 16: mod_base = OTHER; note = 2'-deoxy-2'-fluorocytidine-3'-phosphate
  modified_base 17: mod_base = OTHER; note = 2'-O-methyladenosine-3'-phosphate
  modified_base 18: mod_base = OTHER; note = 2'-O-methyluridine-3'-phosphate
  modified_base 19: mod_base = OTHER; note = 2'-O-methylcytidine-3'-phosphate
  modified_base 20: mod_base = OTHER; note = 2'-O-methyluridine-3'-phosphate
  modified_base 21: mod_base = OTHER; note = 2'-O-methyluridine-3'-phosphorothioate
  modified_base 22: mod_base = OTHER; note = 2'-O-methylcytidine-3'-phosphorothioate
  modified_base 23: mod_base = OTHER; note = 2'-O-methyladenosine
atctatccgctgcagcatcttca

SEQ ID NO: 263 - RNA, 23 nt, synthetic construct
  source 1..23: mol_type = other RNA
  modified_base 1: mod_base = OTHER; note = 2'-O-methyladenosine-3'-phosphorothioate
  modified_base 2: mod_base = OTHER; note = 2'-deoxy-2'-fluoroguanosine-3'-phosphorothioate
  modified_base 3: mod_base = OTHER; note = 2'-O-methylguanosine-3'-phosphate
  modified_base 4: mod_base = OTHER; note = 2'-O-methylcytidine-3'-phosphate
  modified_base 5: mod_base = OTHER; note = 2'-O-methyluridine-3'-phosphate
  modified_base 6: mod_base = OTHER; note = 2'-O-methyladenosine-3'-phosphate
  modified_base 7: mod_base = OTHER; note = Adenosine-glycol nucleic acid (GNA), S-isomer
  modified_base 8: mod_base = OTHER; note = 2'-O-methylguanosine-3'-phosphate
  modified_base 9: mod_base = OTHER; note = 2'-O-methylcytidine-3'-phosphate
  modified_base 10: mod_base = OTHER; note = 2'-O-methylguanosine-3'-phosphate
  modified_base 11: mod_base = OTHER; note = 2'-O-methyladenosine-3'-phosphate
  modified_base 12: mod_base = OTHER; note = 2'-O-methyluridine-3'-phosphate
  modified_base 13: mod_base = OTHER; note = 2'-O-methylcytidine-3'-phosphate
  modified_base 14: mod_base = OTHER; note = 2'-deoxy-2'-fluorouridine-3'-phosphate
  modified_base 15: mod_base = OTHER; note = 2'-O-methylcytidine-3'-phosphate
  modified_base 16: mod_base = OTHER; note = 2'-deoxy-2'-fluoroguanosine-3'-phosphate
  modified_base 17: mod_base = OTHER; note = 2'-O-methyladenosine-3'-phosphate
  modified_base 18: mod_base = OTHER; note = 2'-O-methylguanosine-3'-phosphate
  modified_base 19: mod_base = OTHER; note = 2'-O-methyladenosine-3'-phosphate
  modified_base 20: mod_base = OTHER; note = 2'-O-methyladenosine-3'-phosphate
  modified_base 21: mod_base = OTHER; note = 2'-O-methyluridine-3'-phosphorothioate
  modified_base 22: mod_base = OTHER; note = 2'-O-methylguanosine-3'-phosphorothioate
  modified_base 23: mod_base = OTHER; note = 2'-O-methylcytidine
aggctaagcgatctcgagaatgc

SEQ ID NO: 264 - RNA, 23 nt, synthetic construct
  source 1..23: mol_type = other RNA
  modified_base 1: mod_base = OTHER; note = 2'-O-methyladenosine-3'-phosphorothioate
  modified_base 2: mod_base = OTHER; note = 2'-deoxy-2'-fluoroadenosine-3'-phosphorothioate
  modified_base 3: mod_base = OTHER; note = 2'-O-methyladenosine-3'-phosphate
  modified_base 4: mod_base = OTHER; note = 2'-O-methylcytidine-3'-phosphate
  modified_base 5: mod_base = OTHER; note = 2'-O-methylguanosine-3'-phosphate
  modified_base 6: mod_base = OTHER; note = 2'-O-methylcytidine-3'-phosphate
  modified_base 7: mod_base = OTHER; note = Cytidine-glycol nucleic acid (GNA), S-isomer
  modified_base 8: mod_base = OTHER; note = 2'-O-methyluridine-3'-phosphate
  modified_base 9: mod_base = OTHER; note = 2'-O-methylcytidine-3'-phosphate
  modified_base 10: mod_base = OTHER; note = 2'-O-methylcytidine-3'-phosphate
  modified_base 11: mod_base = OTHER; note = 2'-O-methylcytidine-3'-phosphate
  modified_base 12: mod_base = OTHER; note = 2'-O-methyladenosine-3'-phosphate
  modified_base 13: mod_base = OTHER; note = 2'-O-methylcytidine-3'-phosphate
  modified_base 14: mod_base = OTHER; note = 2'-deoxy-2'-fluorouridine-3'-phosphate
  modified_base 15: mod_base = OTHER; note = 2'-O-methyluridine-3'-phosphate
  modified_base 16: mod_base = OTHER; note = 2'-deoxy-2'-fluorocytidine-3'-phosphate
  modified_base 17: mod_base = OTHER; note = 2'-O-methyluridine-3'-phosphate
  modified_base 18: mod_base = OTHER; note = 2'-O-methylcytidine-3'-phosphate
  modified_base 19: mod_base = OTHER; note = 2'-O-methyladenosine-3'-phosphate
  modified_base 20: mod_base = OTHER; note = 2'-O-methylguanosine-3'-phosphate
  modified_base 21: mod_base = OTHER; note = 2'-O-methylcytidine-3'-phosphorothioate
  modified_base 22: mod_base = OTHER; note = 2'-O-methylcytidine-3'-phosphorothioate
  modified_base 23: mod_base = OTHER; note = 2'-O-methyluridine
aaacgcctcccacttctcagcct

SEQ ID NO: 265 - RNA, 23 nt, synthetic construct
  source 1..23: mol_type = other RNA
  modified_base 1: mod_base = OTHER; note = 2'-O-methyluridine-3'-phosphorothioate
  modified_base 2: mod_base = OTHER; note = 2'-deoxy-2'-fluoroguanosine-3'-phosphorothioate
  modified_base 3: mod_base = OTHER; note = 2'-O-methylcytidine-3'-phosphate
  modified_base 4: mod_base = OTHER; note = 2'-O-methylguanosine-3'-phosphate
  modified_base 5: mod_base = OTHER; note = 2'-O-methyluridine-3'-phosphate
  modified_base 6: mod_base = OTHER; note = 2'-O-methylcytidine-3'-phosphate
  modified_base 7: mod_base = OTHER; note = Thymidine-glycol nucleic acid (GNA), S-Isomer
  modified_base 8: mod_base = OTHER; note = 2'-O-methyladenosine-3'-phosphate
  modified_base 9: mod_base = OTHER; note = 2'-O-methyluridine-3'-phosphate
  modified_base 10: mod_base = OTHER; note = 2'-O-methylcytidine-3'-phosphate
  modified_base 11: mod_base = OTHER; note = 2'-O-methylcytidine-3'-phosphate
  modified_base 12: mod_base = OTHER; note = 2'-O-methylguanosine-3'-phosphate
  modified_base 13: mod_base = OTHER; note = 2'-O-methylcytidine-3'-phosphate
  modified_base 14: mod_base = OTHER; note = 2'-deoxy-2'-fluorouridine-3'-phosphate
  modified_base 15: mod_base = OTHER; note = 2'-O-methylguanosine-3'-phosphate
  modified_base 16: mod_base = OTHER; note = 2'-deoxy-2'-fluorocytidine-3'-phosphate
  modified_base 17: mod_base = OTHER; note = 2'-O-methyladenosine-3'-phosphate
  modified_base 18: mod_base = OTHER; note = 2'-O-methylguanosine-3'-phosphate
  modified_base 19: mod_base = OTHER; note = 2'-O-methylcytidine-3'-phosphate
  modified_base 20: mod_base = OTHER; note = 2'-O-methyladenosine-3'-phosphate
  modified_base 21: mod_base = OTHER; note = 2'-O-methyluridine-3'-phosphorothioate
  modified_base 22: mod_base = OTHER; note = 2'-O-methylcytidine-3'-phosphorothioate
  modified_base 23: mod_base = OTHER; note = 2'-O-methyluridine
tgcgtctatccgctgcagcatct

SEQ ID NO: 266 - RNA, 23 nt, synthetic construct
  source 1..23: mol_type = other RNA
  modified_base 1: mod_base = OTHER; note = 2'-O-methyladenosine-3'-phosphorothioate
  modified_base 2: mod_base = OTHER; note = 2'-deoxy-2'-fluoroadenosine-3'-phosphorothioate
  modified_base 3: mod_base = OTHER; note = 2'-O-methyluridine-3'-phosphate
  modified_base 4: mod_base = OTHER; note = 2'-O-methylcytidine-3'-phosphate
  modified_base 5: mod_base = OTHER; note = 2'-O-methyluridine-3'-phosphate
  modified_base 6: mod_base = OTHER; note = 2'-O-methylcytidine-3'-phosphate
  modified_base 7: mod_base = OTHER; note = Guanosine-glycol nucleic acid (GNA), S-isomer
  modified_base 8: mod_base = OTHER; note = 2'-O-methyladenosine-3'-phosphate
  modified_base 9: mod_base = OTHER; note = 2'-O-methylguanosine-3'-phosphate
  modified_base 10: mod_base = OTHER; note = 2'-O-methyladenosine-3'-phosphate
  modified_base 11: mod_base = OTHER; note = 2'-O-methyladenosine-3'-phosphate
  modified_base 12: mod_base = OTHER; note = 2'-O-methyluridine-3'-phosphate
  modified_base 13: mod_base = OTHER; note = 2'-O-methylguanosine-3'-phosphate
  modified_base 14: mod_base = OTHER; note = 2'-deoxy-2'-fluorocytidine-3'-phosphate
  modified_base 15: mod_base = OTHER; note = 2'-O-methyladenosine-3'-phosphate
  modified_base 16: mod_base = OTHER; note = 2'-deoxy-2'-fluoroadenosine-3'-phosphate
  modified_base 17: mod_base = OTHER; note = 2'-O-methyladenosine-3'-phosphate
  modified_base 18: mod_base = OTHER; note = 2'-O-methylguanosine-3'-phosphate
  modified_base 19: mod_base = OTHER; note = 2'-O-methyladenosine-3'-phosphate
  modified_base 20: mod_base = OTHER; note = 2'-O-methylguanosine-3'-phosphate
  modified_base 21: mod_base = OTHER; note = 2'-O-methyladenosine-3'-phosphorothioate
  modified_base 22: mod_base = OTHER; note = 2'-O-methyladenosine-3'-phosphorothioate
  modified_base 23: mod_base = OTHER; note = 2'-O-methyladenosine
aatctcgagaatgcaaagagaaa

SEQ ID NO: 267 - RNA, 23 nt, synthetic construct
  source 1..23: mol_type = other RNA
  modified_base 1: mod_base = OTHER; note = 2'-O-methyladenosine-3'-phosphorothioate
  modified_base 2: mod_base = OTHER; note = 2'-deoxy-2'-fluoroguanosine-3'-phosphorothioate
  modified_base 3: mod_base = OTHER; note = 2'-O-methyladenosine-3'-phosphate
  modified_base 4: mod_base = OTHER; note = 2'-O-methyluridine-3'-phosphate
  modified_base 5: mod_base = OTHER; note = 2'-O-methylcytidine-3'-phosphate
  modified_base 6: mod_base = OTHER; note = 2'-O-methyluridine-3'-phosphate
  modified_base 7: mod_base = OTHER; note = Cytidine-glycol nucleic acid (GNA), S-isomer
  modified_base 8: mod_base = OTHER; note = 2'-O-methylguanosine-3'-phosphate
  modified_base 9: mod_base = OTHER; note = 2'-O-methyladenosine-3'-phosphate
  modified_base 10: mod_base = OTHER; note = 2'-O-methylguanosine-3'-phosphate
  modified_base 11: mod_base = OTHER; note = 2'-O-methyladenosine-3'-phosphate
  modified_base 12: mod_base = OTHER; note = 2'-O-methyladenosine-3'-phosphate
  modified_base 13: mod_base = OTHER; note = 2'-O-methyluridine-3'-phosphate
  modified_base 14: mod_base = OTHER; note = 2'-deoxy-2'-fluoroguanosine-3'-phosphate
  modified_base 15: mod_base = OTHER; note = 2'-O-methylcytidine-3'-phosphate
  modified_base 16: mod_base = OTHER; note = 2'-deoxy-2'-fluoroadenosine-3'-phosphate
  modified_base 17: mod_base = OTHER; note = 2'-O-methyladenosine-3'-phosphate
  modified_base 18: mod_base = OTHER; note = 2'-O-methyladenosine-3'-phosphate
  modified_base 19: mod_base = OTHER; note = 2'-O-methylguanosine-3'-phosphate
  modified_base 20: mod_base = OTHER; note = 2'-O-methyladenosine-3'-phosphate
  modified_base 21: mod_base = OTHER; note = 2'-O-methylguanosine-3'-phosphorothioate
  modified_base 22: mod_base = OTHER; note = 2'-O-methyladenosine-3'-phosphorothioate
  modified_base 23: mod_base = OTHER; note = 2'-O-methyladenosine
agatctcgagaatgcaaagagaa

SEQ ID NO: 268 - RNA, 23 nt, synthetic construct
  source 1..23: mol_type = other RNA
  modified_base 1: mod_base = OTHER; note = 2'-O-methyluridine-3'-phosphorothioate
  modified_base 2: mod_base = OTHER; note = 2'-deoxy-2'-fluorouridine-3'-phosphorothioate
  modified_base 3: mod_base = OTHER; note = 2'-O-methyladenosine-3'-phosphate
  modified_base 4: mod_base = OTHER; note = 2'-O-methyladenosine-3'-phosphate
  modified_base 5: mod_base = OTHER; note = 2'-O-methyluridine-3'-phosphate
  modified_base 6: mod_base = OTHER; note = 2'-O-methyluridine-3'-phosphate
  modified_base 7: mod_base = OTHER; note = Cytidine-glycol nucleic acid (GNA), S-isomer
  modified_base 8: mod_base = OTHER; note = 2'-O-methylcytidine-3'-phosphate
  modified_base 9: mod_base = OTHER; note = 2'-O-methyladenosine-3'-phosphate
  modified_base 10: mod_base = OTHER; note = 2'-O-methyladenosine-3'-phosphate
  modified_base 11: mod_base = OTHER; note = 2'-O-methylguanosine-3'-phosphate
  modified_base 12: mod_base = OTHER; note = 2'-O-methylguanosine-3'-phosphate
  modified_base 13: mod_base = OTHER; note = 2'-O-methyluridine-3'-phosphate
  modified_base 14: mod_base = OTHER; note = 2'-deoxy-2'-fluoroguanosine-3'-phosphate
  modified_base 15: mod_base = OTHER; note = 2'-O-methylguanosine-3'-phosphate
  modified_base 16: mod_base = OTHER; note = 2'-deoxy-2'-fluoroguanosine-3'-phosphate
  modified_base 17: mod_base = OTHER; note = 2'-O-methylcytidine-3'-phosphate
  modified_base 18: mod_base = OTHER; note = 2'-O-methyluridine-3'-phosphate
  modified_base 19: mod_base = OTHER; note = 2'-O-methylcytidine-3'-phosphate
  modified_base 20: mod_base = OTHER; note = 2'-O-methylcytidine-3'-phosphate
  modified_base 21: mod_base = OTHER; note = 2'-O-methyladenosine-3'-phosphorothioate
  modified_base 22: mod_base = OTHER; note = 2'-O-methyladenosine-3'-phosphorothioate
  modified_base 23: mod_base = OTHER; note = 2'-O-methylguanosine
ttaattccaaggtgggctccaag

SEQ ID NO: 269 - RNA, 23 nt, synthetic construct
  source 1..23: mol_type = other RNA
  modified_base 1: mod_base = OTHER; note = 2'-O-methyluridine-3'-phosphorothioate
  modified_base 2: mod_base = OTHER; note = 2'-deoxy-2'-fluorouridine-3'-phosphorothioate
  modified_base 3: mod_base = OTHER; note = 2'-O-methyladenosine-3'-phosphate
  modified_base 4: mod_base = OTHER; note = 2'-O-methylguanosine-3'-phosphate
  modified_base 5: mod_base = OTHER; note = 2'-O-methylguanosine-3'-phosphate
  modified_base 6: mod_base = OTHER; note = 2'-O-methylguanosine-3'-phosphate
  modified_base 7: mod_base = OTHER; note = Thymidine-glycol nucleic acid (GNA), S-Isomer
  modified_base 8: mod_base = OTHER; note = 2'-O-methyladenosine-3'-phosphate
  modified_base 9: mod_base = OTHER; note = 2'-O-methylcytidine-3'-phosphate
  modified_base 10: mod_base = OTHER; note = 2'-O-methyluridine-3'-phosphate
  modified_base 11: mod_base = OTHER; note = 2'-O-methyluridine-3'-phosphate
  modified_base 12: mod_base = OTHER; note = 2'-O-methylguanosine-3'-phosphate
  modified_base 13: mod_base = OTHER; note = 2'-O-methyluridine-3'-phosphate
  modified_base 14: mod_base = OTHER; note = 2'-deoxy-2'-fluorocytidine-3'-phosphate
  modified_base 15: mod_base = OTHER; note = 2'-O-methylcytidine-3'-phosphate
  modified_base 16: mod_base = OTHER; note = 2'-deoxy-2'-fluoroadenosine-3'-phosphate
  modified_base 17: mod_base = OTHER; note = 2'-O-methylcytidine-3'-phosphate
  modified_base 18: mod_base = OTHER; note = 2'-O-methylcytidine-3'-phosphate
  modified_base 19: mod_base = OTHER; note = 2'-O-methyladenosine-3'-phosphate
  modified_base 20: mod_base = OTHER; note = 2'-O-methylguanosine-3'-phosphate
  modified_base 21: mod_base = OTHER; note = 2'-O-methylguanosine-3'-phosphorothioate
  modified_base 22: mod_base = OTHER; note = 2'-O-methylcytidine-3'-phosphorothioate
  modified_base 23: mod_base = OTHER; note = 2'-O-methyluridine
ttagggtacttgtccaccaggct

SEQ ID NO: 270 - RNA, 23 nt, synthetic construct
  source 1..23: mol_type = other RNA
  modified_base 1: mod_base = OTHER; note = 2'-O-methyladenosine-3'-phosphorothioate
  modified_base 2: mod_base = OTHER; note = 2'-deoxy-2'-fluoroguanosine-3'-phosphorothioate
  modified_base 3: mod_base = OTHER; note = 2'-O-methylcytidine-3'-phosphate
  modified_base 4: mod_base = OTHER; note = 2'-O-methylguanosine-3'-phosphate
  modified_base 5: mod_base = OTHER; note = 2'-O-methylguanosine-3'-phosphate
  modified_base 6: mod_base = OTHER; note = 2'-O-methylcytidine-3'-phosphate
  modified_base 7: mod_base = OTHER; note = Thymidine-glycol nucleic acid (GNA), S-Isomer
  modified_base 8: mod_base = OTHER; note = 2'-O-methyladenosine-3'-phosphate
  modified_base 9: mod_base = OTHER; note = 2'-O-methyladenosine-3'-phosphate
  modified_base 10: mod_base = OTHER; note = 2'-O-methylguanosine-3'-phosphate
  modified_base 11: mod_base = OTHER; note = 2'-O-methylcytidine-3'-phosphate
  modified_base 12: mod_base = OTHER; note = 2'-O-methylguanosine-3'-phosphate
  modified_base 13: mod_base = OTHER; note = 2'-O-methyladenosine-3'-phosphate
  modified_base 14: mod_base = OTHER; note = 2'-deoxy-2'-fluorouridine-3'-phosphate
  modified_base 15: mod_base = OTHER; note = 2'-O-methylcytidine-3'-phosphate
  modified_base 16: mod_base = OTHER; note = 2'-deoxy-2'-fluorouridine-3'-phosphate
  modified_base 17: mod_base = OTHER; note = 2'-O-methylcytidine-3'-phosphate
  modified_base 18: mod_base = OTHER; note = 2'-O-methylguanosine-3'-phosphate
  modified_base 19: mod_base = OTHER; note = 2'-O-methyladenosine-3'-phosphate
  modified_base 20: mod_base = OTHER; note = 2'-O-methylguanosine-3'-phosphate
  modified_base 21: mod_base = OTHER; note = 2'-O-methyladenosine-3'-phosphorothioate
  modified_base 22: mod_base = OTHER; note = 2'-O-methyladenosine-3'-phosphorothioate
  modified_base 23: mod_base = OTHER; note = 2'-O-methyluridine
agcggctaagcgatctcgagaat

SEQ ID NO: 271 - RNA, 23 nt, synthetic construct
  source 1..23: mol_type = other RNA
  modified_base 1: mod_base = OTHER; note = 2'-O-methyluridine-3'-phosphorothioate
  modified_base 2: mod_base = OTHER; note = 2'-deoxy-2'-fluorocytidine-3'-phosphorothioate
  modified_base 3: mod_base = OTHER; note = 2'-O-methylcytidine-3'-phosphate
  modified_base 4: mod_base = OTHER; note = 2'-O-methyluridine-3'-phosphate
  modified_base 5: mod_base = OTHER; note = 2'-O-methylcytidine-3'-phosphate
  modified_base 6: mod_base = OTHER; note = 2'-O-methylguanosine-3'-phosphate
  modified_base 7: mod_base = OTHER; note = Cytidine-glycol nucleic acid (GNA), S-isomer
  modified_base 8: mod_base = OTHER; note = 2'-O-methyluridine-3'-phosphate
  modified_base 9: mod_base = OTHER; note = 2'-O-methyluridine-3'-phosphate
  modified_base 10: mod_base = OTHER; note = 2'-O-methylguanosine-3'-phosphate
  modified_base 11: mod_base = OTHER; note = 2'-O-methyluridine-3'-phosphate
  modified_base 12: mod_base = OTHER; note = 2'-O-methylcytidine-3'-phosphate
  modified_base 13: mod_base = OTHER; note = 2'-O-methyladenosine-3'-phosphate
  modified_base 14: mod_base = OTHER; note = 2'-deoxy-2'-fluoroguanosine-3'-phosphate
  modified_base 15: mod_base = OTHER; note = 2'-O-methyladenosine-3'-phosphate
  modified_base 16: mod_base = OTHER; note = 2'-deoxy-2'-fluorouridine-3'-phosphate
  modified_base 17: mod_base = OTHER; note = 2'-O-methylguanosine-3'-phosphate
  modified_base 18: mod_base = OTHER; note = 2'-O-methylguanosine-3'-phosphate
  modified_base 19: mod_base = OTHER; note = 2'-O-methyladenosine-3'-phosphate
  modified_base 20: mod_base = OTHER; note = 2'-O-methylcytidine-3'-phosphate
  modified_base 21: mod_base = OTHER; note = 2'-O-methyluridine-3'-phosphorothioate
  modified_base 22: mod_base = OTHER; note = 2'-O-methylcytidine-3'-phosphorothioate
  modified_base 23: mod_base = OTHER; note = 2'-O-methyladenosine
tcctcgcttgtcagatggactca

SEQ ID NO: 272 - RNA, 23 nt, synthetic construct
  source 1..23: mol_type = other RNA
  modified_base 1: mod_base = OTHER; note = 2'-O-methyladenosine-3'-phosphorothioate
  modified_base 2: mod_base = OTHER; note = 2'-deoxy-2'-fluoroguanosine-3'-phosphorothioate
  modified_base 3: mod_base = OTHER; note = 2'-O-methyluridine-3'-phosphate
  modified_base 4: mod_base = OTHER; note = 2'-O-methylcytidine-3'-phosphate
  modified_base 5: mod_base = OTHER; note = 2'-O-methyluridine-3'-phosphate
  modified_base 6: mod_base = OTHER; note = 2'-O-methylcytidine-3'-phosphate
  modified_base 7: mod_base = OTHER; note = Cytidine-glycol nucleic acid (GNA), S-isomer
  modified_base 8: mod_base = OTHER; note = 2'-O-methylguanosine-3'-phosphate
  modified_base 9: mod_base = OTHER; note = 2'-O-methyluridine-3'-phosphate
  modified_base 10: mod_base = OTHER; note = 2'-O-methyladenosine-3'-phosphate
  modified_base 11: mod_base = OTHER; note = 2'-O-methylguanosine-3'-phosphate
  modified_base 12: mod_base = OTHER; note = 2'-O-methylcytidine-3'-phosphate
  modified_base 13: mod_base = OTHER; note = 2'-O-methylcytidine-3'-phosphate
  modified_base 14: mod_base = OTHER; note = 2'-deoxy-2'-fluoroadenosine-3'-phosphate
  modified_base 15: mod_base = OTHER; note = 2'-O-methyladenosine-3'-phosphate
  modified_base 16: mod_base = OTHER; note = 2'-deoxy-2'-fluoroadenosine-3'-phosphate
  modified_base 17: mod_base = OTHER; note = 2'-O-methylcytidine-3'-phosphate
  modified_base 18: mod_base = OTHER; note = 2'-O-methyladenosine-3'-phosphate
  modified_base 19: mod_base = OTHER; note = 2'-O-methylguanosine-3'-phosphate
  modified_base 20: mod_base = OTHER; note = 2'-O-methylcytidine-3'-phosphate
  modified_base 21: mod_base = OTHER; note = 2'-O-methyluridine-3'-phosphorothioate
  modified_base 22: mod_base = OTHER; note = 2'-O-methylguanosine-3'-phosphorothioate
  modified_base 23: mod_base = OTHER; note = 2'-O-methylguanosine
agtctccgtagccaaacagctgg

SEQ ID NO: 273 - RNA, 23 nt, synthetic construct
  source 1..23: mol_type = other RNA
  modified_base 1: mod_base = OTHER; note = 2'-O-methyladenosine-3'-phosphorothioate
  modified_base 2: mod_base = OTHER; note = 2'-deoxy-2'-fluorocytidine-3'-phosphorothioate
  modified_base 3: mod_base = OTHER; note = 2'-O-methylguanosine-3'-phosphate
  modified_base 4: mod_base = OTHER; note = 2'-O-methyluridine-3'-phosphate
  modified_base 5: mod_base = OTHER; note = 2'-O-methylcytidine-3'-phosphate
  modified_base 6: mod_base = OTHER; note = 2'-O-methyluridine-3'-phosphate
  modified_base 7: mod_base = OTHER; note = Adenosine-glycol nucleic acid (GNA), S-isomer
  modified_base 8: mod_base = OTHER; note = 2'-O-methyluridine-3'-phosphate
  modified_base 9: mod_base = OTHER; note = 2'-O-methylcytidine-3'-phosphate
  modified_base 10: mod_base = OTHER; note = 2'-O-methylcytidine-3'-phosphate
  modified_base 11: mod_base = OTHER; note = 2'-O-methylguanosine-3'-phosphate
  modified_base 12: mod_base = OTHER; note = 2'-O-methylcytidine-3'-phosphate
  modified_base 13: mod_base = OTHER; note = 2'-O-methyluridine-3'-phosphate
  modified_base 14: mod_base = OTHER; note = 2'-deoxy-2'-fluoroguanosine-3'-phosphate
  modified_base 15: mod_base = OTHER; note = 2'-O-methylcytidine-3'-phosphate
  modified_base 16: mod_base = OTHER; note = 2'-deoxy-2'-fluoroadenosine-3'-phosphate
  modified_base 17: mod_base = OTHER; note = 2'-O-methylguanosine-3'-phosphate
  modified_base 18: mod_base = OTHER; note = 2'-O-methylcytidine-3'-phosphate
  modified_base 19: mod_base = OTHER; note = 2'-O-methyladenosine-3'-phosphate
  modified_base 20: mod_base = OTHER; note = 2'-O-methyluridine-3'-phosphate
  modified_base 21: mod_base = OTHER; note = 2'-O-methylcytidine-3'-phosphorothioate
  modified_base 22: mod_base = OTHER; note = 2'-O-methyluridine-3'-phosphorothioate
  modified_base 23: mod_base = OTHER; note = 2'-O-methyluridine
acgtctatccgctgcagcatctt

SEQ ID NO: 274 - RNA, 23 nt, synthetic construct
  source 1..23: mol_type = other RNA
  modified_base 1: mod_base = OTHER; note = 2'-O-methyladenosine-3'-phosphorothioate
  modified_base 2: mod_base = OTHER; note = 2'-deoxy-2'-fluoroadenosine-3'-phosphorothioate
  modified_base 3: mod_base = OTHER; note = 2'-O-methylguanosine-3'-phosphate
  modified_base 4: mod_base = OTHER; note = 2'-O-methylcytidine-3'-phosphate
  modified_base 5: mod_base = OTHER; note = 2'-O-methyluridine-3'-phosphate
  modified_base 6: mod_base = OTHER; note = 2'-O-methyladenosine-3'-phosphate
  modified_base 7: mod_base = OTHER; note = Adenosine-glycol nucleic acid (GNA), S-isomer
  modified_base 8: mod_base = OTHER; note = 2'-O-methyluridine-3'-phosphate
  modified_base 9: mod_base = OTHER; note = 2'-O-methyluridine-3'-phosphate
  modified_base 10: mod_base = OTHER; note = 2'-O-methyladenosine-3'-phosphate
  modified_base 11: mod_base = OTHER; note = 2'-O-methyladenosine-3'-phosphate
  modified_base 12: mod_base = OTHER; note = 2'-O-methyladenosine-3'-phosphate
  modified_base 13: mod_base = OTHER; note = 2'-O-methyluridine-3'-phosphate
  modified_base 14: mod_base = OTHER; note = 2'-deoxy-2'-fluoroguanosine-3'-phosphate
  modified_base 15: mod_base = OTHER; note = 2'-O-methylguanosine-3'-phosphate
  modified_base 16: mod_base = OTHER; note = 2'-deoxy-2'-fluorocytidine-3'-phosphate
  modified_base 17: mod_base = OTHER; note = 2'-O-methyladenosine-3'-phosphate
  modified_base 18: mod_base = OTHER; note = 2'-O-methylguanosine-3'-phosphate
  modified_base 19: mod_base = OTHER; note = 2'-O-methyladenosine-3'-phosphate
  modified_base 20: mod_base = OTHER; note = 2'-O-methyluridine-3'-phosphate
  modified_base 21: mod_base = OTHER; note = 2'-O-methyluridine-3'-phosphorothioate
  modified_base 22: mod_base = OTHER; note = 2'-O-methyluridine-3'-phosphorothioate
  modified_base 23: mod_base = OTHER; note = 2'-O-methyluridine
aagctaattaaatggcagatttt

SEQ ID NO: 275 - RNA, 23 nt, synthetic construct
  source 1..23: mol_type = other RNA
  modified_base 1: mod_base = OTHER; note = 2'-O-methyladenosine-3'-phosphorothioate
  modified_base 2: mod_base = OTHER; note = 2'-deoxy-2'-fluorocytidine-3'-phosphorothioate
  modified_base 3: mod_base = OTHER; note = 2'-O-methyluridine-3'-phosphate
  modified_base 4: mod_base = OTHER; note = 2'-O-methyladenosine-3'-phosphate
  modified_base 5: mod_base = OTHER; note = 2'-O-methyladenosine-3'-phosphate
  modified_base 6: mod_base = OTHER; note = 2'-O-methylguanosine-3'-phosphate
  modified_base 7: mod_base = OTHER; note = Cytidine-glycol nucleic acid (GNA), S-isomer
  modified_base 8: mod_base = OTHER; note = 2'-O-methylguanosine-3'-phosphate
  modified_base 9: mod_base = OTHER; note = 2'-O-methyladenosine-3'-phosphate
  modified_base 10: mod_base = OTHER; note = 2'-O-methyluridine-3'-phosphate
  modified_base 11: mod_base = OTHER; note = 2'-O-methylcytidine-3'-phosphate
  modified_base 12: mod_base = OTHER; note = 2'-O-methyluridine-3'-phosphate
  modified_base 13: mod_base = OTHER; note = 2'-O-methylcytidine-3'-phosphate
  modified_base 14: mod_base = OTHER; note = 2'-deoxy-2'-fluoroguanosine-3'-phosphate
  modified_base 15: mod_base = OTHER; note = 2'-O-methyladenosine-3'-phosphate
  modified_base 16: mod_base = OTHER; note = 2'-deoxy-2'-fluoroguanosine-3'-phosphate
  modified_base 17: mod_base = OTHER; note = 2'-O-methyladenosine-3'-phosphate
  modified_base 18: mod_base = OTHER; note = 2'-O-methyladenosine-3'-phosphate
  modified_base 19: mod_base = OTHER; note = 2'-O-methyluridine-3'-phosphate
  modified_base 20: mod_base = OTHER; note = 2'-O-methylguanosine-3'-phosphate
  modified_base 21: mod_base = OTHER; note = 2'-O-methylcytidine-3'-phosphorothioate
  modified_base 22: mod_base = OTHER; note = 2'-O-methyladenosine-3'-phosphorothioate
  modified_base 23: mod_base = OTHER; note = 2'-O-methyladenosine
actaagcgatctcgagaatgcaa

SEQ ID NO: 276 - RNA, 23 nt, synthetic construct
  source 1..23: mol_type = other RNA
  modified_base 1: mod_base = OTHER; note = 2'-O-methyluridine-3'-phosphorothioate
  modified_base 2: mod_base = OTHER; note = 2'-deoxy-2'-fluorouridine-3'-phosphorothioate
  modified_base 3: mod_base = OTHER; note = 2'-O-methyluridine-3'-phosphate
  modified_base 4: mod_base = OTHER; note = 2'-O-methylcytidine-3'-phosphate
  modified_base 5: mod_base = OTHER; note = 2'-O-methylcytidine-3'-phosphate
  modified_base 6: mod_base = OTHER; note = 2'-O-methyluridine-3'-phosphate
  modified_base 7: mod_base = OTHER; note = Cytidine-glycol nucleic acid (GNA), S-isomer
  modified_base 8: mod_base = OTHER; note = 2'-O-methyladenosine-3'-phosphate
  modified_base 9: mod_base = OTHER; note = 2'-O-methylcytidine-3'-phosphate
  modified_base 10: mod_base = OTHER; note = 2'-O-methyladenosine-3'-phosphate
  modified_base 11: mod_base = OTHER; note = 2'-O-methylcytidine-3'-phosphate
  modified_base 12: mod_base = OTHER; note = 2'-O-methylguanosine-3'-phosphate
  modified_base 13: mod_base = OTHER; note = 2'-O-methyladenosine-3'-phosphate
  modified_base 14: mod_base = OTHER; note = 2'-deoxy-2'-fluorocytidine-3'-phosphate
  modified_base 15: mod_base = OTHER; note = 2'-O-methylcytidine-3'-phosphate
  modified_base 16: mod_base = OTHER; note = 2'-deoxy-2'-fluoroadenosine-3'-phosphate
  modified_base 17: mod_base = OTHER; note = 2'-O-methyluridine-3'-phosphate
  modified_base 18: mod_base = OTHER; note = 2'-O-methyladenosine-3'-phosphate
  modified_base 19: mod_base = OTHER; note = 2'-O-methylcytidine-3'-phosphate
  modified_base 20: mod_base = OTHER; note = 2'-O-methyladenosine-3'-phosphate
  modified_base 21: mod_base = OTHER; note = 2'-O-methyladenosine-3'-phosphorothioate
  modified_base 22: mod_base = OTHER; note = 2'-O-methylguanosine-3'-phosphorothioate
  modified_base 23: mod_base = OTHER; note = 2'-O-methylcytidine
tttcctcacacgaccatacaagc

SEQ ID NO: 277 - RNA, 23 nt, synthetic construct
  source 1..23: mol_type = other RNA
  modified_base 1: mod_base = OTHER; note = 2'-O-methyladenosine-3'-phosphorothioate
  modified_base 2: mod_base = OTHER; note = 2'-deoxy-2'-fluorouridine-3'-phosphorothioate
  modified_base 3: mod_base = OTHER; note = 2'-O-methyladenosine-3'-phosphate
  modified_base 4: mod_base = OTHER; note = 2'-O-methyluridine-3'-phosphate
  modified_base 5: mod_base = OTHER; note = 2'-O-methylcytidine-3'-phosphate
  modified_base 6: mod_base = OTHER; note = 2'-O-methylcytidine-3'-phosphate
  modified_base 7: mod_base = OTHER; note = Guanosine-glycol nucleic acid (GNA), S-isomer
  modified_base 8: mod_base = OTHER; note = 2'-O-methylcytidine-3'-phosphate
  modified_base 9: mod_base = OTHER; note = 2'-O-methyluridine-3'-phosphate
  modified_base 10: mod_base = OTHER; note = 2'-O-methylguanosine-3'-phosphate
  modified_base 11: mod_base = OTHER; note = 2'-O-methylcytidine-3'-phosphate
  modified_base 12: mod_base = OTHER; note = 2'-O-methyladenosine-3'-phosphate
  modified_base 13: mod_base = OTHER; note = 2'-O-methylguanosine-3'-phosphate
  modified_base 14: mod_base = OTHER; note = 2'-deoxy-2'-fluorocytidine-3'-phosphate
  modified_base 15: mod_base = OTHER; note = 2'-O-methyladenosine-3'-phosphate
  modified_base 16: mod_base = OTHER; note = 2'-deoxy-2'-fluorouridine-3'-phosphate
  modified_base 17: mod_base = OTHER; note = 2'-O-methylcytidine-3'-phosphate
  modified_base 18: mod_base = OTHER; note = 2'-O-methyluridine-3'-phosphate
  modified_base 19: mod_base = OTHER; note = 2'-O-methyluridine-3'-phosphate
  modified_base 20: mod_base = OTHER; note = 2'-O-methylcytidine-3'-phosphate
  modified_base 21: mod_base = OTHER; note = 2'-O-methyladenosine-3'-phosphorothioate
  modified_base 22: mod_base = OTHER; note = 2'-O-methylcytidine-3'-phosphorothioate
  modified_base 23: mod_base = OTHER; note = 2'-O-methylcytidine
atatccgctgcagcatcttcacc

SEQ ID NO: 278 - RNA, 23 nt, synthetic construct
  source 1..23: mol_type = other RNA
  modified_base 1: mod_base = OTHER; note = 2'-O-methyladenosine-3'-phosphorothioate
  modified_base 2: mod_base = OTHER; note = 2'-deoxy-2'-fluoroadenosine-3'-phosphorothioate
  modified_base 3: mod_base = OTHER; note = 2'-O-methyluridine-3'-phosphate
  modified_base 4: mod_base = OTHER; note = 2'-O-methylguanosine-3'-phosphate
  modified_base 5: mod_base = OTHER; note = 2'-O-methylcytidine-3'-phosphate
  modified_base 6: mod_base = OTHER; note = 2'-O-methylcytidine-3'-phosphate
  modified_base 7: mod_base = OTHER; note = Adenosine-glycol nucleic acid (GNA), S-isomer
  modified_base 8: mod_base = OTHER; note = 2'-O-methyluridine-3'-phosphate
  modified_base 9: mod_base = OTHER; note = 2'-O-methylcytidine-3'-phosphate
  modified_base 10: mod_base = OTHER; note = 2'-O-methyladenosine-3'-phosphate
  modified_base 11: mod_base = OTHER; note = 2'-O-methyladenosine-3'-phosphate
  modified_base 12: mod_base = OTHER; note = 2'-O-methyladenosine-3'-phosphate
  modified_base 13: mod_base = OTHER; note = 2'-O-methylguanosine-3'-phosphate
  modified_base 14: mod_base = OTHER; note = 2'-deoxy-2'-fluorocytidine-3'-phosphate
  modified_base 15: mod_base = OTHER; note = 2'-O-methylcytidine-3'-phosphate
  modified_base 16: mod_base = OTHER; note = 2'-deoxy-2'-fluorocytidine-3'-phosphate
  modified_base 17: mod_base = OTHER; note = 2'-O-methyluridine-3'-phosphate
  modified_base 18: mod_base = OTHER; note = 2'-O-methylguanosine-3'-phosphate
  modified_base 19: mod_base = OTHER; note = 2'-O-methylcytidine-3'-phosphate
  modified_base 20: mod_base = OTHER; note = 2'-O-methyladenosine-3'-phosphate
  modified_base 21: mod_base = OTHER; note = 2'-O-methylguanosine-3'-phosphorothioate
  modified_base 22: mod_base = OTHER; note = 2'-O-methylguanosine-3'-phosphorothioate
  modified_base 23: mod_base = OTHER; note = 2'-O-methylcytidine
aatgccatcaaagccctgcaggc

SEQ ID NO: 279 - RNA, 23 nt, synthetic construct
  source 1..23: mol_type = other RNA
  modified_base 1: mod_base = OTHER; note = 2'-O-methyladenosine-3'-phosphorothioate
  modified_base 2: mod_base = OTHER; note = 2'-deoxy-2'-fluoroadenosine-3'-phosphorothioate
  modified_base 3: mod_base = OTHER; note = 2'-O-methylcytidine-3'-phosphate
  modified_base 4: mod_base = OTHER; note = 2'-O-methyladenosine-3'-phosphate
  modified_base 5: mod_base = OTHER; note = 2'-O-methylcytidine-3'-phosphate
  modified_base 6: mod_base = OTHER; note = 2'-O-methylcytidine-3'-phosphate
  modified_base 7: mod_base = OTHER; note = Adenosine-glycol nucleic acid (GNA), S-isomer
  modified_base 8: mod_base = OTHER; note = 2'-O-methylcytidine-3'-phosphate
  modified_base 9: mod_base = OTHER; note = 2'-O-methylguanosine-3'-phosphate
  modified_base 10: mod_base = OTHER; note = 2'-O-methyluridine-3'-phosphate
  modified_base 11: mod_base = OTHER; note = 2'-O-methylcytidine-3'-phosphate
  modified_base 12: mod_base = OTHER; note = 2'-O-methyluridine-3'-phosphate
  modified_base 13: mod_base = OTHER; note = 2'-O-methylcytidine-3'-phosphate
  modified_base 14: mod_base = OTHER; note = 2'-deoxy-2'-fluorocytidine-3'-phosphate
  modified_base 15: mod_base = OTHER; note = 2'-O-methylguanosine-3'-phosphate
  modified_base 16: mod_base = OTHER; note = 2'-deoxy-2'-fluorouridine-3'-phosphate
  modified_base 17: mod_base = OTHER; note = 2'-O-methyladenosine-3'-phosphate
  modified_base 18: mod_base = OTHER; note = 2'-O-methylguanosine-3'-phosphate
  modified_base 19: mod_base = OTHER; note = 2'-O-methylcytidine-3'-phosphate
  modified_base 20: mod_base = OTHER; note = 2'-O-methylcytidine-3'-phosphate
  modified_base 21: mod_base = OTHER; note = 2'-O-methyladenosine-3'-phosphorothioate
  modified_base 22: mod_base = OTHER; note = 2'-O-methyladenosine-3'-phosphorothioate
  modified_base 23: mod_base = OTHER; note = 2'-O-methyladenosine
aacaccacgtctccgtagccaaa

SEQ ID NO: 280 - RNA, 23 nt, synthetic construct
  source 1..23: mol_type = other RNA
  modified_base 1: mod_base = OTHER; note = 2'-O-methyluridine-3'-phosphorothioate
  modified_base 2: mod_base = OTHER; note = 2'-deoxy-2'-fluorocytidine-3'-phosphorothioate
  modified_base 3: mod_base = OTHER; note = 2'-O-methyluridine-3'-phosphate
  modified_base 4: mod_base = OTHER; note = 2'-O-methyladenosine-3'-phosphate
  modified_base 5: mod_base = OTHER; note = 2'-O-methyluridine-3'-phosphate
  modified_base 6: mod_base = OTHER; note = 2'-O-methylcytidine-3'-phosphate
  modified_base 7: mod_base = OTHER; note = Cytidine-glycol nucleic acid (GNA), S-isomer
  modified_base 8: mod_base = OTHER; note = 2'-O-methylguanosine-3'-phosphate
  modified_base 9: mod_base = OTHER; note = 2'-O-methylcytidine-3'-phosphate
  modified_base 10: mod_base = OTHER; note = 2'-O-methyluridine-3'-phosphate
  modified_base 11: mod_base = OTHER; note = 2'-O-methylguanosine-3'-phosphate
  modified_base 12: mod_base = OTHER; note = 2'-O-methylcytidine-3'-phosphate
  modified_base 13: mod_base = OTHER; note = 2'-O-methyladenosine-3'-phosphate
  modified_base 14: mod_base = OTHER; note = 2'-deoxy-2'-fluoroguanosine-3'-phosphate
  modified_base 15: mod_base = OTHER; note = 2'-O-methylcytidine-3'-phosphate
  modified_base 16: mod_base = OTHER; note = 2'-deoxy-2'-fluoroadenosine-3'-phosphate
  modified_base 17: mod_base = OTHER; note = 2'-O-methyluridine-3'-phosphate
  modified_base 18: mod_base = OTHER; note = 2'-O-methylcytidine-3'-phosphate
  modified_base 19: mod_base = OTHER; note = 2'-O-methyluridine-3'-phosphate
  modified_base 20: mod_base = OTHER; note = 2'-O-methyluridine-3'-phosphate
  modified_base 21: mod_base = OTHER; note = 2'-O-methylcytidine-3'-phosphorothioate
  modified_base 22: mod_base = OTHER; note = 2'-O-methyladenosine-3'-phosphorothioate
  modified_base 23: mod_base = OTHER; note = 2'-O-methylcytidine
tctatccgctgcagcatcttcac

SEQ ID NO: 281 - RNA, 23 nt, synthetic construct
  source 1..23: mol_type = other RNA
  modified_base 1: mod_base = OTHER; note = 2'-O-methyladenosine-3'-phosphorothioate
  modified_base 2: mod_base = OTHER; note = 2'-deoxy-2'-fluorocytidine-3'-phosphorothioate
  modified_base 3: mod_base = OTHER; note = 2'-O-methyladenosine-3'-phosphate
  modified_base 4: mod_base = OTHER; note = 2'-O-methyluridine-3'-phosphate
  modified_base 5: mod_base = OTHER; note = 2'-O-methyluridine-3'-phosphate
  modified_base 6: mod_base = OTHER; note = 2'-O-methylguanosine-3'-phosphate
  modified_base 7: mod_base = OTHER; note = Adenosine-glycol nucleic acid (GNA), S-isomer
  modified_base 8: mod_base = OTHER; note = 2'-O-methyladenosine-3'-phosphate
  modified_base 9: mod_base = OTHER; note = 2'-O-methylguanosine-3'-phosphate
  modified_base 10: mod_base = OTHER; note = 2'-O-methylguanosine-3'-phosphate
  modified_base 11: mod_base = OTHER; note = 2'-O-methyluridine-3'-phosphate
  modified_base 12: mod_base = OTHER; note = 2'-O-methylguanosine-3'-phosphate
  modified_base 13: mod_base = OTHER; note = 2'-O-methyluridine-3'-phosphate
  modified_base 14: mod_base = OTHER; note = 2'-deoxy-2'-fluorocytidine-3'-phosphate
  modified_base 15: mod_base = OTHER; note = 2'-O-methyluridine-3'-phosphate
  modified_base 16: mod_base = OTHER; note = 2'-deoxy-2'-fluorocytidine-3'-phosphate
  modified_base 17: mod_base = OTHER; note = 2'-O-methylcytidine-3'-phosphate
  modified_base 18: mod_base = OTHER; note = 2'-O-methyladenosine-3'-phosphate
  modified_base 19: mod_base = OTHER; note = 2'-O-methylguanosine-3'-phosphate
  modified_base 20: mod_base = OTHER; note = 2'-O-methylcytidine-3'-phosphate
  modified_base 21: mod_base = OTHER; note = 2'-O-methyluridine-3'-phosphorothioate
  modified_base 22: mod_base = OTHER; note = 2'-O-methylcytidine-3'-phosphorothioate
  modified_base 23: mod_base = OTHER; note = 2'-O-methylcytidine
acattgaaggtgtctccagctcc

SEQ ID NO: 282 - RNA, 23 nt, synthetic construct
  source 1..23: mol_type = other RNA
  modified_base 1: mod_base = OTHER; note = 2'-O-methyladenosine-3'-phosphorothioate
  modified_base 2: mod_base = OTHER; note = 2'-deoxy-2'-fluorocytidine-3'-phosphorothioate
  modified_base 3: mod_base = OTHER; note = 2'-O-methyladenosine-3'-phosphate
  modified_base 4: mod_base = OTHER; note = 2'-O-methylcytidine-3'-phosphate
  modified_base 5: mod_base = OTHER; note = 2'-O-methylguanosine-3'-phosphate
  modified_base 6: mod_base = OTHER; note = 2'-O-methyluridine-3'-phosphate
  modified_base 7: mod_base = OTHER; note = Cytidine-glycol nucleic acid (GNA), S-isomer
  modified_base 8: mod_base = OTHER; note = 2'-O-methyluridine-3'-phosphate
  modified_base 9: mod_base = OTHER; note = 2'-O-methylcytidine-3'-phosphate
  modified_base 10: mod_base = OTHER; note = 2'-O-methylcytidine-3'-phosphate
  modified_base 11: mod_base = OTHER; note = 2'-O-methylguanosine-3'-phosphate
  modified_base 12: mod_base = OTHER; note = 2'-O-methyluridine-3'-phosphate
  modified_base 13: mod_base = OTHER; note = 2'-O-methyladenosine-3'-phosphate
  modified_base 14: mod_base = OTHER; note = 2'-deoxy-2'-fluoroguanosine-3'-phosphate
  modified_base 15: mod_base = OTHER; note = 2'-O-methylcytidine-3'-phosphate
  modified_base 16: mod_base = OTHER; note = 2'-deoxy-2'-fluorocytidine-3'-phosphate
  modified_base 17: mod_base = OTHER; note = 2'-O-methyladenosine-3'-phosphate
  modified_base 18: mod_base = OTHER; note = 2'-O-methyladenosine-3'-phosphate
  modified_base 19: mod_base = OTHER; note = 2'-O-methyladenosine-3'-phosphate
  modified_base 20: mod_base = OTHER; note = 2'-O-methylcytidine-3'-phosphate
  modified_base 21: mod_base = OTHER; note = 2'-O-methyladenosine-3'-phosphorothioate
  modified_base 22: mod_base = OTHER; note = 2'-O-methylguanosine-3'-phosphorothioate
  modified_base 23: mod_base = OTHER; note = 2'-O-methylcytidine
acacgtctccgtagccaaacagc

SEQ ID NO: 283 - RNA, 23 nt, synthetic construct
  source 1..23: mol_type = other RNA
  modified_base 1: mod_base = OTHER; note = 2'-O-methyladenosine-3'-phosphorothioate
  modified_base 2: mod_base = OTHER; note = 2'-deoxy-2'-fluorouridine-3'-phosphorothioate
  modified_base 3: mod_base = OTHER; note = 2'-O-methyladenosine-3'-phosphate
  modified_base 4: mod_base = OTHER; note = 2'-O-methyladenosine-3'-phosphate
  modified_base 5: mod_base = OTHER; note = 2'-O-methylguanosine-3'-phosphate
  modified_base 6: mod_base = OTHER; note = 2'-O-methylcytidine-3'-phosphate
  modified_base 7: mod_base = OTHER; note = Guanosine-glycol nucleic acid (GNA), S-isomer
  modified_base 8: mod_base = OTHER; note = 2'-O-methyladenosine-3'-phosphate
  modified_base 9: mod_base = OTHER; note = 2'-O-methyluridine-3'-phosphate
  modified_base 10: mod_base = OTHER; note = 2'-O-methylcytidine-3'-phosphate
  modified_base 11: mod_base = OTHER; note = 2'-O-methyluridine-3'-phosphate
  modified_base 12: mod_base = OTHER; note = 2'-O-methylcytidine-3'-phosphate
  modified_base 13: mod_base = OTHER; note = 2'-O-methylguanosine-3'-phosphate
  modified_base 14: mod_base = OTHER; note = 2'-deoxy-2'-fluoroadenosine-3'-phosphate
  modified_base 15: mod_base = OTHER; note = 2'-O-methylguanosine-3'-phosphate
  modified_base 16: mod_base = OTHER; note = 2'-deoxy-2'-fluoroadenosine-3'-phosphate
  modified_base 17: mod_base = OTHER; note = 2'-O-methyladenosine-3'-phosphate
  modified_base 18: mod_base = OTHER; note = 2'-O-methyluridine-3'-phosphate
  modified_base 19: mod_base = OTHER; note = 2'-O-methylguanosine-3'-phosphate
  modified_base 20: mod_base = OTHER; note = 2'-O-methylcytidine-3'-phosphate
  modified_base 21: mod_base = OTHER; note = 2'-O-methyladenosine-3'-phosphorothioate
  modified_base 22: mod_base = OTHER; note = 2'-O-methyladenosine-3'-phosphorothioate
  modified_base 23: mod_base = OTHER; note = 2'-O-methyladenosine
ataagcgatctcgagaatgcaaa

SEQ ID NO: 284 - RNA, 23 nt, synthetic construct
  source 1..23: mol_type = other RNA
  modified_base 1: mod_base = OTHER; note = 2'-O-methyluridine-3'-phosphorothioate
  modified_base 2: mod_base = OTHER; note = 2'-deoxy-2'-fluorouridine-3'-phosphorothioate
  modified_base 3: mod_base = OTHER; note = 2'-O-methyladenosine-3'-phosphate
  modified_base 4: mod_base = OTHER; note = 2'-O-methyladenosine-3'-phosphate
  modified_base 5: mod_base = OTHER; note = 2'-O-methyladenosine-3'-phosphate
  modified_base 6: mod_base = OTHER; note = 2'-O-methylguanosine-3'-phosphate
  modified_base 7: mod_base = OTHER; note = Cytidine-glycol nucleic acid (GNA), S-isomer
  modified_base 8: mod_base = OTHER; note = 2'-O-methylguanosine-3'-phosphate
  modified_base 9: mod_base = OTHER; note = 2'-O-methylcytidine-3'-phosphate
  modified_base 10: mod_base = OTHER; note = 2'-O-methylguanosine-3'-phosphate
  modified_base 11: mod_base = OTHER; note = 2'-O-methylguanosine-3'-phosphate
  modified_base 12: mod_base = OTHER; note = 2'-O-methylcytidine-3'-phosphate
  modified_base 13: mod_base = OTHER; note = 2'-O-methyluridine-3'-phosphate
  modified_base 14: mod_base = OTHER; note = 2'-deoxy-2'-fluoroadenosine-3'-phosphate
  modified_base 15: mod_base = OTHER; note = 2'-O-methyladenosine-3'-phosphate
  modified_base 16: mod_base = OTHER; note = 2'-deoxy-2'-fluoroguanosine-3'-phosphate
  modified_base 17: mod_base = OTHER; note = 2'-O-methylcytidine-3'-phosphate
  modified_base 18: mod_base = OTHER; note = 2'-O-methylguanosine-3'-phosphate
  modified_base 19: mod_base = OTHER; note = 2'-O-methyladenosine-3'-phosphate
  modified_base 20: mod_base = OTHER; note = 2'-O-methyluridine-3'-phosphate
  modified_base 21: mod_base = OTHER; note = 2'-O-methylcytidine-3'-phosphorothioate
  modified_base 22: mod_base = OTHER; note = 2'-O-methyluridine-3'-phosphorothioate
  modified_base 23: mod_base = OTHER; note = 2'-O-methylcytidine
ttaaagcgcggctaagcgatctc

SEQ ID NO: 285 - RNA, 23 nt, synthetic construct
  source 1..23: mol_type = other RNA
  modified_base 1: mod_base = OTHER; note = 2'-O-methyluridine-3'-phosphorothioate
  modified_base 2: mod_base = OTHER; note = 2'-deoxy-2'-fluorocytidine-3'-phosphorothioate
  modified_base 3: mod_base = OTHER; note = 2'-O-methyladenosine-3'-phosphate
  modified_base 4: mod_base = OTHER; note = 2'-O-methyladenosine-3'-phosphate
  modified_base 5: mod_base = OTHER; note = 2'-O-methyladenosine-3'-phosphate
  modified_base 6: mod_base = OTHER; note = 2'-O-methyluridine-3'-phosphate
  modified_base 7: mod_base = OTHER; note = Cytidine-glycol nucleic acid (GNA), S-isomer
  modified_base 8: mod_base = OTHER; note = 2'-O-methyladenosine-3'-phosphate
  modified_base 9: mod_base = OTHER; note = 2'-O-methylcytidine-3'-phosphate
  modified_base 10: mod_base = OTHER; note = 2'-O-methyladenosine-3'-phosphate
  modified_base 11: mod_base = OTHER; note = 2'-O-methylguanosine-3'-phosphate
  modified_base 12: mod_base = OTHER; note = 2'-O-methylguanosine-3'-phosphate
  modified_base 13: mod_base = OTHER; note = 2'-O-methylcytidine-3'-phosphate
  modified_base 14: mod_base = OTHER; note = 2'-deoxy-2'-fluorouridine-3'-phosphate
  modified_base 15: mod_base = OTHER; note = 2'-O-methylguanosine-3'-phosphate
  modified_base 16: mod_base = OTHER; note = 2'-deoxy-2'-fluoroguanosine-3'-phosphate
  modified_base 17: mod_base = OTHER; note = 2'-O-methyluridine-3'-phosphate
  modified_base 18: mod_base = OTHER; note = 2'-O-methylguanosine-3'-phosphate
  modified_base 19: mod_base = OTHER; note = 2'-O-methylguanosine-3'-phosphate
  modified_base 20: mod_base = OTHER; note = 2'-O-methylguanosine-3'-phosphate
  modified_base 21: mod_base = OTHER; note = 2'-O-methylcytidine-3'-phosphorothioate
  modified_base 22: mod_base = OTHER; note = 2'-O-methyladenosine-3'-phosphorothioate
  modified_base 23: mod_base = OTHER; note = 2'-O-methylguanosine
tcaaatcacaggctggtgggcag

SEQ ID NO: 286 - RNA, 23 nt, synthetic construct
  source 1..23: mol_type = other RNA
  modified_base 1: mod_base = OTHER; note = 2'-O-methyluridine-3'-phosphorothioate
  modified_base 2: mod_base = OTHER; note = 2'-deoxy-2'-fluorouridine-3'-phosphorothioate
  modified_base 3: mod_base = OTHER; note = 2'-O-methylguanosine-3'-phosphate
  modified_base 4: mod_base = OTHER; note = 2'-O-methylcytidine-3'-phosphate
  modified_base 5: mod_base = OTHER; note = 2'-O-methyluridine-3'-phosphate
  modified_base 6: mod_base = OTHER; note = 2'-O-methylguanosine-3'-phosphate
  modified_base 7: mod_base = OTHER; note = Adenosine-glycol nucleic acid (GNA), S-isomer
  modified_base 8: mod_base = OTHER; note = 2'-O-methylcytidine-3'-phosphate
  modified_base 9: mod_base = OTHER; note = 2'-O-methyladenosine-3'-phosphate
  modified_base 10: mod_base = OTHER; note = 2'-O-methyladenosine-3'-phosphate
  modified_base 11: mod_base = OTHER; note = 2'-O-methyladenosine-3'-phosphate
  modified_base 12: mod_base = OTHER; note = 2'-O-methylcytidine-3'-phosphate
  modified_base 13: mod_base = OTHER; note = 2'-O-methyladenosine-3'-phosphate
  modified_base 14: mod_base = OTHER; note = 2'-deoxy-2'-fluorocytidine-3'-phosphate
  modified_base 15: mod_base = OTHER; note = 2'-O-methylcytidine-3'-phosphate
  modified_base 16: mod_base = OTHER; note = 2'-deoxy-2'-fluoroadenosine-3'-phosphate
  modified_base 17: mod_base = OTHER; note = 2'-O-methylcytidine-3'-phosphate
  modified_base 18: mod_base = OTHER; note = 2'-O-methylguanosine-3'-phosphate
  modified_base 19: mod_base = OTHER; note = 2'-O-methyluridine-3'-phosphate
  modified_base 20: mod_base = OTHER; note = 2'-O-methylcytidine-3'-phosphate
  modified_base 21: mod_base = OTHER; note = 2'-O-methyluridine-3'-phosphorothioate
  modified_base 22: mod_base = OTHER; note = 2'-O-methylcytidine-3'-phosphorothioate
  modified_base 23: mod_base = OTHER; note = 2'-O-methylcytidine
ttgctgacaaacaccacgtctcc

SEQ ID NO: 287 - RNA, 23 nt, synthetic construct
  source 1..23: mol_type = other RNA
  modified_base 1: mod_base = OTHER; note = 2'-O-methyladenosine-3'-phosphorothioate
  modified_base 2: mod_base = OTHER; note = 2'-deoxy-2'-fluoroguanosine-3'-phosphorothioate
  modified_base 3: mod_base = OTHER; note = 2'-O-methyluridine-3'-phosphate
  modified_base 4: mod_base = OTHER; note = 2'-O-methylcytidine-3'-phosphate
  modified_base 5: mod_base = OTHER; note = 2'-O-methyluridine-3'-phosphate
  modified_base 6: mod_base = OTHER; note = 2'-O-methyladenosine-3'-phosphate
  modified_base 7: mod_base = OTHER; note = Thymidine-glycol nucleic acid (GNA), S-Isomer
  modified_base 8: mod_base = OTHER; note = 2'-O-methylcytidine-3'-phosphate
  modified_base 9: mod_base = OTHER; note = 2'-O-methylcytidine-3'-phosphate
  modified_base 10: mod_base = OTHER; note = 2'-O-methylguanosine-3'-phosphate
  modified_base 11: mod_base = OTHER; note = 2'-O-methylcytidine-3'-phosphate
  modified_base 12: mod_base = OTHER; note = 2'-O-methyluridine-3'-phosphate
  modified_base 13: mod_base = OTHER; note = 2'-O-methylguanosine-3'-phosphate
  modified_base 14: mod_base = OTHER; note = 2'-deoxy-2'-fluorocytidine-3'-phosphate
  modified_base 15: mod_base = OTHER; note = 2'-O-methyladenosine-3'-phosphate
  modified_base 16: mod_base = OTHER; note = 2'-deoxy-2'-fluoroguanosine-3'-phosphate
  modified_base 17: mod_base = OTHER; note = 2'-O-methylcytidine-3'-phosphate
  modified_base 18: mod_base = OTHER; note = 2'-O-methyladenosine-3'-phosphate
  modified_base 19: mod_base = OTHER; note = 2'-O-methyluridine-3'-phosphate
  modified_base 20: mod_base = OTHER; note = 2'-O-methylcytidine-3'-phosphate
  modified_base 21: mod_base = OTHER; note = 2'-O-methyluridine-3'-phosphorothioate
  modified_base 22: mod_base = OTHER; note = 2'-O-methyluridine-3'-phosphorothioate
  modified_base 23: mod_base = OTHER; note = 2'-O-methylcytidine
agtctatccgctgcagcatcttc

SEQ ID NO: 288 - RNA, 23 nt, synthetic construct
  source 1..23: mol_type = other RNA
  modified_base 1: mod_base = OTHER; note = 2'-O-methyladenosine-3'-phosphorothioate
  modified_base 2: mod_base = OTHER; note = 2'-deoxy-2'-fluorocytidine-3'-phosphorothioate
  modified_base 3: mod_base = OTHER; note = 2'-O-methyladenosine-3'-phosphate
  modified_base 4: mod_base = OTHER; note = 2'-O-methylcytidine-3'-phosphate
  modified_base 5: mod_base = OTHER; note = 2'-O-methylguanosine-3'-phosphate
  modified_base 6: mod_base = OTHER; note = 2'-O-methylcytidine-3'-phosphate
  modified_base 7: mod_base = OTHER; note = Adenosine-glycol nucleic acid (GNA), S-isomer
  modified_base 8: mod_base = OTHER; note = 2'-O-methylcytidine-3'-phosphate
  modified_base 9: mod_base = OTHER; note = 2'-O-methyladenosine-3'-phosphate
  modified_base 10: mod_base = OTHER; note = 2'-O-methylguanosine-3'-phosphate
  modified_base 11: mod_base = OTHER; note = 2'-O-methylguanosine-3'-phosphate
  modified_base 12: mod_base = OTHER; note = 2'-O-methyladenosine-3'-phosphate
  modified_base 13: mod_base = OTHER; note = 2'-O-methyluridine-3'-phosphate
  modified_base 14: mod_base = OTHER; note = 2'-deoxy-2'-fluorocytidine-3'-phosphate
  modified_base 15: mod_base = OTHER; note = 2'-O-methyluridine-3'-phosphate
  modified_base 16: mod_base = OTHER; note = 2'-deoxy-2'-fluoroguanosine-3'-phosphate
  modified_base 17: mod_base = OTHER; note = 2'-O-methylcytidine-3'-phosphate
  modified_base 18: mod_base = OTHER; note = 2'-O-methyluridine-3'-phosphate
  modified_base 19: mod_base = OTHER; note = 2'-O-methyluridine-3'-phosphate
  modified_base 20: mod_base = OTHER; note = 2'-O-methylcytidine-3'-phosphate
  modified_base 21: mod_base = OTHER; note = 2'-O-methyluridine-3'-phosphorothioate
  modified_base 22: mod_base = OTHER; note = 2'-O-methylcytidine-3'-phosphorothioate
  modified_base 23: mod_base = OTHER; note = 2'-O-methyluridine
acacgcacaggatctgcttctct

SEQ ID NO: 289 - RNA, 23 nt, synthetic construct
  source 1..23: mol_type = other RNA
  modified_base 1: mod_base = OTHER; note = 2'-O-methyluridine-3'-phosphorothioate
  modified_base 2: mod_base = OTHER; note = 2'-deoxy-2'-fluorocytidine-3'-phosphorothioate
  modified_base 3: mod_base = OTHER; note = 2'-O-methylcytidine-3'-phosphate
  modified_base 4: mod_base = OTHER; note = 2'-O-methyluridine-3'-phosphate
  modified_base 5: mod_base = OTHER; note = 2'-O-methylcytidine-3'-phosphate
  modified_base 6: mod_base = OTHER; note = 2'-O-methyladenosine-3'-phosphate
  modified_base 7: mod_base = OTHER; note = Cytidine-glycol nucleic acid (GNA), S-isomer
  modified_base 8: mod_base = OTHER; note = 2'-O-methyladenosine-3'-phosphate
  modified_base 9: mod_base = OTHER; note = 2'-O-methylcytidine-3'-phosphate
  modified_base 10: mod_base = OTHER; note = 2'-O-methylguanosine-3'-phosphate
  modified_base 11: mod_base = OTHER; note = 2'-O-methyladenosine-3'-phosphate
  modified_base 12: mod_base = OTHER; note = 2'-O-methylcytidine-3'-phosphate
  modified_base 13: mod_base = OTHER; note = 2'-O-methylcytidine-3'-phosphate
  modified_base 14: mod_base = OTHER; note = 2'-deoxy-2'-fluoroadenosine-3'-phosphate
  modified_base 15: mod_base = OTHER; note = 2'-O-methyluridine-3'-phosphate
  modified_base 16: mod_base = OTHER; note = 2'-deoxy-2'-fluoroadenosine-3'-phosphate
  modified_base 17: mod_base = OTHER; note = 2'-O-methylcytidine-3'-phosphate
  modified_base 18: mod_base = OTHER; note = 2'-O-methyladenosine-3'-phosphate
  modified_base 19: mod_base = OTHER; note = 2'-O-methyladenosine-3'-phosphate
  modified_base 20: mod_base = OTHER; note = 2'-O-methylguanosine-3'-phosphate
  modified_base 21: mod_base = OTHER; note = 2'-O-methylcytidine-3'-phosphorothioate
  modified_base 22: mod_base = OTHER; note = 2'-O-methylcytidine-3'-phosphorothioate
  modified_base 23: mod_base = OTHER; note = 2'-O-methylcytidine
tcctcacacgaccatacaagccc

SEQ ID NO: 290 - RNA, 23 nt, synthetic construct
  source 1..23: mol_type = other RNA
  modified_base 1: mod_base = OTHER; note = 2'-O-methyladenosine-3'-phosphorothioate
  modified_base 2: mod_base = OTHER; note = 2'-deoxy-2'-fluorocytidine-3'-phosphorothioate
  modified_base 3: mod_base = OTHER; note = 2'-O-methylguanosine-3'-phosphate
  modified_base 4: mod_base = OTHER; note = 2'-O-methylguanosine-3'-phosphate
  modified_base 5: mod_base = OTHER; note = 2'-O-methylcytidine-3'-phosphate
  modified_base 6: mod_base = OTHER; note = 2'-O-methyluridine-3'-phosphate
  modified_base 7: mod_base = OTHER; note = Adenosine-glycol nucleic acid (GNA), S-isomer
  modified_base 8: mod_base = OTHER; note = 2'-O-methyladenosine-3'-phosphate
  modified_base 9: mod_base = OTHER; note = 2'-O-methylguanosine-3'-phosphate
  modified_base 10: mod_base = OTHER; note = 2'-O-methylcytidine-3'-phosphate
  modified_base 11: mod_base = OTHER; note = 2'-O-methylguanosine-3'-phosphate
  modified_base 12: mod_base = OTHER; note = 2'-O-methyladenosine-3'-phosphate
  modified_base 13: mod_base = OTHER; note = 2'-O-methyluridine-3'-phosphate
  modified_base 14: mod_base = OTHER; note = 2'-deoxy-2'-fluorocytidine-3'-phosphate
  modified_base 15: mod_base = OTHER; note = 2'-O-methyluridine-3'-phosphate
  modified_base 16: mod_base = OTHER; note = 2'-deoxy-2'-fluorocytidine-3'-phosphate
  modified_base 17: mod_base = OTHER; note = 2'-O-methylguanosine-3'-phosphate
  modified_base 18: mod_base = OTHER; note = 2'-O-methyladenosine-3'-phosphate
  modified_base 19: mod_base = OTHER; note = 2'-O-methylguanosine-3'-phosphate
  modified_base 20: mod_base = OTHER; note = 2'-O-methyladenosine-3'-phosphate
  modified_base 21: mod_base = OTHER; note = 2'-O-methyladenosine-3'-phosphorothioate
  modified_base 22: mod_base = OTHER; note = 2'-O-methyluridine-3'-phosphorothioate
  modified_base 23: mod_base = OTHER; note = 2'-O-methylguanosine
acggctaagcgatctcgagaatg

SEQ ID NO: 291 - RNA, 23 nt, synthetic construct
  source 1..23: mol_type = other RNA
  modified_base 1: mod_base = OTHER; note = 2'-O-methyluridine-3'-phosphorothioate
  modified_base 2: mod_base = OTHER; note = 2'-deoxy-2'-fluoroguanosine-3'-phosphorothioate
  modified_base 3: mod_base = OTHER; note = 2'-O-methylguanosine-3'-phosphate
  modified_base 4: mod_base = OTHER; note = 2'-O-methylguanosine-3'-phosphate
  modified_base 5: mod_base = OTHER; note = 2'-O-methyluridine-3'-phosphate
  modified_base 6: mod_base = OTHER; note = 2'-O-methylcytidine-3'-phosphate
  modified_base 7: mod_base = OTHER; note = Adenosine-glycol nucleic acid (GNA), S-isomer
  modified_base 8: mod_base = OTHER; note = 2'-O-methylguanosine-3'-phosphate
  modified_base 9: mod_base = OTHER; note = 2'-O-methyladenosine-3'-phosphate
  modified_base 10: mod_base = OTHER; note = 2'-O-methyluridine-3'-phosphate
  modified_base 11: mod_base = OTHER; note = 2'-O-methylcytidine-3'-phosphate
  modified_base 12: mod_base = OTHER; note = 2'-O-methyladenosine-3'-phosphate
  modified_base 13: mod_base = OTHER; note = 2'-O-methyladenosine-3'-phosphate
  modified_base 14: mod_base = OTHER; note = 2'-deoxy-2'-fluorocytidine-3'-phosphate
  modified_base 15: mod_base = OTHER; note = 2'-O-methylcytidine-3'-phosphate
  modified_base 16: mod_base = OTHER; note = 2'-deoxy-2'-fluorouridine-3'-phosphate
  modified_base 17: mod_base = OTHER; note = 2'-O-methyluridine-3'-phosphate
  modified_base 18: mod_base = OTHER; note = 2'-O-methylcytidine-3'-phosphate
  modified_base 19: mod_base = OTHER; note = 2'-O-methyluridine-3'-phosphate
  modified_base 20: mod_base = OTHER; note = 2'-O-methylcytidine-3'-phosphate
  modified_base 21: mod_base = OTHER; note = 2'-O-methyladenosine-3'-phosphorothioate
  modified_base 22: mod_base = OTHER; note = 2'-O-methyladenosine-3'-phosphorothioate
  modified_base 23: mod_base = OTHER; note = 2'-O-methyladenosine
tgggtcagatcaaccttctcaaa

SEQ ID NO: 292 - RNA, 23 nt, synthetic construct
  source 1..23: mol_type = other RNA
  modified_base 1: mod_base = OTHER; note = 2'-O-methyluridine-3'-phosphorothioate
  modified_base 2: mod_base = OTHER; note = 2'-deoxy-2'-fluoroadenosine-3'-phosphorothioate
  modified_base 3: mod_base = OTHER; note = 2'-O-methyladenosine-3'-phosphate
  modified_base 4: mod_base = OTHER; note = 2'-O-methylguanosine-3'-phosphate
  modified_base 5: mod_base = OTHER; note = 2'-O-methylcytidine-3'-phosphate
  modified_base 6: mod_base = OTHER; note = 2'-O-methylguanosine-3'-phosphate
  modified_base 7: mod_base = OTHER; note = Adenosine-glycol nucleic acid (GNA), S-isomer
  modified_base 8: mod_base = OTHER; note = 2'-O-methyluridine-3'-phosphate
  modified_base 9: mod_base = OTHER; note = 2'-O-methylcytidine-3'-phosphate
  modified_base 10: mod_base = OTHER; note = 2'-O-methyluridine-3'-phosphate
  modified_base 11: mod_base = OTHER; note = 2'-O-methylcytidine-3'-phosphate
  modified_base 12: mod_base = OTHER; note = 2'-O-methylguanosine-3'-phosphate
  modified_base 13: mod_base = OTHER; note = 2'-O-methyladenosine-3'-phosphate
  modified_base 14: mod_base = OTHER; note = 2'-deoxy-2'-fluoroguanosine-3'-phosphate
  modified_base 15: mod_base = OTHER; note = 2'-O-methyladenosine-3'-phosphate
  modified_base 16: mod_base = OTHER; note = 2'-deoxy-2'-fluoroadenosine-3'-phosphate
  modified_base 17: mod_base = OTHER; note = 2'-O-methyluridine-3'-phosphate
  modified_base 18: mod_base = OTHER; note = 2'-O-methylguanosine-3'-phosphate
  modified_base 19: mod_base = OTHER; note = 2'-O-methylcytidine-3'-phosphate
  modified_base 20: mod_base = OTHER; note = 2'-O-methyladenosine-3'-phosphate
  modified_base 21: mod_base = OTHER; note = 2'-O-methyladenosine-3'-phosphorothioate
  modified_base 22: mod_base = OTHER; note = 2'-O-methyladenosine-3'-phosphorothioate
  modified_base 23: mod_base = OTHER; note = 2'-O-methylguanosine
taagcgatctcgagaatgcaaag

SEQ ID NO: 293 - RNA, 23 nt, synthetic construct
  source 1..23: mol_type = other RNA
  modified_base 1: mod_base = OTHER; note = 2'-O-methyladenosine-3'-phosphorothioate
  modified_base 2: mod_base = OTHER; note = 2'-deoxy-2'-fluoroadenosine-3'-phosphorothioate
  modified_base 3: mod_base = OTHER; note = 2'-O-methyladenosine-3'-phosphate
  modified_base 4: mod_base = OTHER; note = 2'-O-methyluridine-3'-phosphate
  modified_base 5: mod_base = OTHER; note = 2'-O-methyladenosine-3'-phosphate
  modified_base 6: mod_base = OTHER; note = 2'-O-methylguanosine-3'-phosphate
  modified_base 7: mod_base = OTHER; note = Adenosine-glycol nucleic acid (GNA), S-isomer
  modified_base 8: mod_base = OTHER; note = 2'-O-methylguanosine-3'-phosphate
  modified_base 9: mod_base = OTHER; note = 2'-O-methyluridine-3'-phosphate
  modified_base 10: mod_base = OTHER; note = 2'-O-methylcytidine-3'-phosphate
  modified_base 11: mod_base = OTHER; note = 2'-O-methyluridine-3'-phosphate
  modified_base 12: mod_base = OTHER; note = 2'-O-methylguanosine-3'-phosphate
  modified_base 13: mod_base = OTHER; note = 2'-O-methylcytidine-3'-phosphate
  modified_base 14: mod_base = OTHER; note = 2'-deoxy-2'-fluoroadenosine-3'-phosphate
  modified_base 15: mod_base = OTHER; note = 2'-O-methylcytidine-3'-phosphate
  modified_base 16: mod_base = OTHER; note = 2'-deoxy-2'-fluoroadenosine-3'-phosphate
  modified_base 17: mod_base = OTHER; note = 2'-O-methyladenosine-3'-phosphate
  modified_base 18: mod_base = OTHER; note = 2'-O-methylcytidine-3'-phosphate
  modified_base 19: mod_base = OTHER; note = 2'-O-methylguanosine-3'-phosphate
  modified_base 20: mod_base = OTHER; note = 2'-O-methylcytidine-3'-phosphate
  modified_base 21: mod_base = OTHER; note = 2'-O-methyladenosine-3'-phosphorothioate
  modified_base 22: mod_base = OTHER; note = 2'-O-methylguanosine-3'-phosphorothioate
  modified_base 23: mod_base = OTHER; note = 2'-O-methylguanosine
aaatagagtctgcacaacgcagg

SEQ ID NO: 294 - RNA, 23 nt, synthetic construct
  source 1..23: mol_type = other RNA
  modified_base 1: mod_base = OTHER; note = 2'-O-methyladenosine-3'-phosphorothioate
  modified_base 2: mod_base = OTHER; note = 2'-deoxy-2'-fluoroadenosine-3'-phosphorothioate
  modified_base 3: mod_base = OTHER; note = 2'-O-methylguanosine-3'-phosphate
  modified_base 4: mod_base = OTHER; note = 2'-O-methyladenosine-3'-phosphate
  modified_base 5: mod_base = OTHER; note = 2'-O-methyladenosine-3'-phosphate
  modified_base 6: mod_base = OTHER; note = 2'-O-methylcytidine-3'-phosphate
  modified_base 7: mod_base = OTHER; note = Guanosine-glycol nucleic acid (GNA), S-isomer
  modified_base 8: mod_base = OTHER; note = 2'-O-methylguanosine-3'-phosphate
  modified_base 9: mod_base = OTHER; note = 2'-O-methyluridine-3'-phosphate
  modified_base 10: mod_base = OTHER; note = 2'-O-methylguanosine-3'-phosphate
  modified_base 11: mod_base = OTHER; note = 2'-O-methylcytidine-3'-phosphate
  modified_base 12: mod_base = OTHER; note = 2'-O-methyladenosine-3'-phosphate
  modified_base 13: mod_base = OTHER; note = 2'-O-methylguanosine-3'-phosphate
  modified_base 14: mod_base = OTHER; note = 2'-deoxy-2'-fluoroguanosine-3'-phosphate
  modified_base 15: mod_base = OTHER; note = 2'-O-methyladenosine-3'-phosphate
  modified_base 16: mod_base = OTHER; note = 2'-deoxy-2'-fluoroguanosine-3'-phosphate
  modified_base 17: mod_base = OTHER; note = 2'-O-methyluridine-3'-phosphate
  modified_base 18: mod_base = OTHER; note = 2'-O-methyluridine-3'-phosphate
  modified_base 19: mod_base = OTHER; note = 2'-O-methylguanosine-3'-phosphate
  modified_base 20: mod_base = OTHER; note = 2'-O-methylguanosine-3'-phosphate
  modified_base 21: mod_base = OTHER; note = 2'-O-methyladenosine-3'-phosphorothioate
  modified_base 22: mod_base = OTHER; note = 2'-O-methylcytidine-3'-phosphorothioate
  modified_base 23: mod_base = OTHER; note = 2'-O-methylguanosine
aagaacggtgcaggagttggacg

SEQ ID NO: 295 - RNA, 23 nt, synthetic construct
  source 1..23: mol_type = other RNA
  modified_base 1: mod_base = OTHER; note = 2'-O-methyladenosine-3'-phosphorothioate
  modified_base 2: mod_base = OTHER; note = 2'-deoxy-2'-fluoroadenosine-3'-phosphorothioate
  modified_base 3: mod_base = OTHER; note = 2'-O-methyladenosine-3'-phosphate
  modified_base 4: mod_base = OTHER; note = 2'-O-methylguanosine-3'-phosphate
  modified_base 5: mod_base = OTHER; note = 2'-O-methylcytidine-3'-phosphate
  modified_base 6: mod_base = OTHER; note = 2'-O-methylguanosine-3'-phosphate
  modified_base 7: mod_base = OTHER; note = Cytidine-glycol nucleic acid (GNA), S-isomer
  modified_base 8: mod_base = OTHER; note = 2'-O-methylguanosine-3'-phosphate
  modified_base 9: mod_base = OTHER; note = 2'-O-methylguanosine-3'-phosphate
  modified_base 10: mod_base = OTHER; note = 2'-O-methylcytidine-3'-phosphate
  modified_base 11: mod_base = OTHER; note = 2'-O-methyluridine-3'-phosphate
  modified_base 12: mod_base = OTHER; note = 2'-O-methyladenosine-3'-phosphate
  modified_base 13: mod_base = OTHER; note = 2'-O-methyladenosine-3'-phosphate
  modified_base 14: mod_base = OTHER; note = 2'-deoxy-2'-fluoroguanosine-3'-phosphate
  modified_base 15: mod_base = OTHER; note = 2'-O-methylcytidine-3'-phosphate
  modified_base 16: mod_base = OTHER; note = 2'-deoxy-2'-fluoroguanosine-3'-phosphate
  modified_base 17: mod_base = OTHER; note = 2'-O-methyladenosine-3'-phosphate
  modified_base 18: mod_base = OTHER; note = 2'-O-methyluridine-3'-phosphate
  modified_base 19: mod_base = OTHER; note = 2'-O-methylcytidine-3'-phosphate
  modified_base 20: mod_base = OTHER; note = 2'-O-methyluridine-3'-phosphate
  modified_base 21: mod_base = OTHER; note = 2'-O-methylcytidine-3'-phosphorothioate
  modified_base 22: mod_base = OTHER; note = 2'-O-methylguanosine-3'-phosphorothioate
  modified_base 23: mod_base = OTHER; note = 2'-O-methyladenosine
aaagcgcggctaagcgatctcga

SEQ ID NO: 296 - RNA, 23 nt, synthetic construct
  source 1..23: mol_type = other RNA
  modified_base 1: mod_base = OTHER; note = 2'-O-methyladenosine-3'-phosphorothioate
  modified_base 2: mod_base = OTHER; note = 2'-deoxy-2'-fluoroadenosine-3'-phosphorothioate
  modified_base 3: mod_base = OTHER; note = 2'-O-methylcytidine-3'-phosphate
  modified_base 4: mod_base = OTHER; note = 2'-O-methylguanosine-3'-phosphate
  modified_base 5: mod_base = OTHER; note = 2'-O-methyluridine-3'-phosphate
  modified_base 6: mod_base = OTHER; note = 2'-O-methylcytidine-3'-phosphate
  modified_base 7: mod_base = OTHER; note = Thymidine-glycol nucleic acid (GNA), S-Isomer
  modified_base 8: mod_base = OTHER; note = 2'-O-methylcytidine-3'-phosphate
  modified_base 9: mod_base = OTHER; note = 2'-O-methylcytidine-3'-phosphate
  modified_base 10: mod_base = OTHER; note = 2'-O-methylguanosine-3'-phosphate
  modified_base 11: mod_base = OTHER; note = 2'-O-methyluridine-3'-phosphate
  modified_base 12: mod_base = OTHER; note = 2'-O-methyladenosine-3'-phosphate
  modified_base 13: mod_base = OTHER; note = 2'-O-methylguanosine-3'-phosphate
  modified_base 14: mod_base = OTHER; note = 2'-deoxy-2'-fluorocytidine-3'-phosphate
  modified_base 15: mod_base = OTHER; note = 2'-O-methylcytidine-3'-phosphate
  modified_base 16: mod_base = OTHER; note = 2'-deoxy-2'-fluoroadenosine-3'-phosphate
  modified_base 17: mod_base = OTHER; note = 2'-O-methyladenosine-3'-phosphate
  modified_base 18: mod_base = OTHER; note = 2'-O-methyladenosine-3'-phosphate
  modified_base 19: mod_base = OTHER; note = 2'-O-methylcytidine-3'-phosphate
  modified_base 20: mod_base = OTHER; note = 2'-O-methyladenosine-3'-phosphate
  modified_base 21: mod_base = OTHER; note = 2'-O-methylguanosine-3'-phosphorothioate
  modified_base 22: mod_base = OTHER; note = 2'-O-methylcytidine-3'-phosphorothioate
  modified_base 23: mod_base = OTHER; note = 2'-O-methyluridine
aacgtctccgtagccaaacagct

SEQ ID NO: 297 - RNA, 23 nt, synthetic construct
  source 1..23: mol_type = other RNA
  modified_base 1: mod_base = OTHER; note = 2'-O-methyladenosine-3'-phosphorothioate
  modified_base 2: mod_base = OTHER; note = 2'-deoxy-2'-fluoroadenosine-3'-phosphorothioate
  modified_base 3: mod_base = OTHER; note = 2'-O-methyluridine-3'-phosphate
  modified_base 4: mod_base = OTHER; note = 2'-O-methyluridine-3'-phosphate
  modified_base 5: mod_base = OTHER; note = 2'-O-methylguanosine-3'-phosphate
  modified_base 6: mod_base = OTHER; note = 2'-O-methyladenosine-3'-phosphate
  modified_base 7: mod_base = OTHER; note = Adenosine-glycol nucleic acid (GNA), S-isomer
  modified_base 8: mod_base = OTHER; note = 2'-O-methylguanosine-3'-phosphate
  modified_base 9: mod_base = OTHER; note = 2'-O-methylguanosine-3'-phosphate
  modified_base 10: mod_base = OTHER; note = 2'-O-methyluridine-3'-phosphate
  modified_base 11: mod_base = OTHER; note = 2'-O-methylguanosine-3'-phosphate
  modified_base 12: mod_base = OTHER; note = 2'-O-methyluridine-3'-phosphate
  modified_base 13: mod_base = OTHER; note = 2'-O-methylcytidine-3'-phosphate
  modified_base 14: mod_base = OTHER; note = 2'-deoxy-2'-fluorouridine-3'-phosphate
  modified_base 15: mod_base = OTHER; note = 2'-O-methylcytidine-3'-phosphate
  modified_base 16: mod_base = OTHER; note = 2'-deoxy-2'-fluorocytidine-3'-phosphate
  modified_base 17: mod_base = OTHER; note = 2'-O-methyladenosine-3'-phosphate
  modified_base 18: mod_base = OTHER; note = 2'-O-methylguanosine-3'-phosphate
  modified_base 19: mod_base = OTHER; note = 2'-O-methylcytidine-3'-phosphate
  modified_base 20: mod_base = OTHER; note = 2'-O-methyluridine-3'-phosphate
  modified_base 21: mod_base = OTHER; note = 2'-O-methylcytidine-3'-phosphorothioate
  modified_base 22: mod_base = OTHER; note = 2'-O-methylcytidine-3'-phosphorothioate
  modified_base 23: mod_base = OTHER; note = 2'-O-methylcytidine
aattgaaggtgtctccagctccc

SEQ ID NO: 298 - RNA, 23 nt, synthetic construct
  source 1..23: mol_type = other RNA
  modified_base 1: mod_base = OTHER; note = 2'-O-methyladenosine-3'-phosphorothioate
  modified_base 2: mod_base = OTHER; note = 2'-deoxy-2'-fluoroadenosine-3'-phosphorothioate
  modified_base 3: mod_base = OTHER; note = 2'-O-methylcytidine-3'-phosphate
  modified_base 4: mod_base = OTHER; note = 2'-O-methylguanosine-3'-phosphate
  modified_base 5: mod_base = OTHER; note = 2'-O-methylcytidine-3'-phosphate
  modified_base 6: mod_base = OTHER; note = 2'-O-methylcytidine-3'-phosphate
  modified_base 7: mod_base = OTHER; note = Thymidine-glycol nucleic acid (GNA), S-Isomer
  modified_base 8: mod_base = OTHER; note = 2'-O-methylcytidine-3'-phosphate
  modified_base 9: mod_base = OTHER; note = 2'-O-methylcytidine-3'-phosphate
  modified_base 10: mod_base = OTHER; note = 2'-O-methylcytidine-3'-phosphate
  modified_base 11: mod_base = OTHER; note = 2'-O-methyladenosine-3'-phosphate
  modified_base 12: mod_base = OTHER; note = 2'-O-methylcytidine-3'-phosphate
  modified_base 13: mod_base = OTHER; note = 2'-O-methyluridine-3'-phosphate
  modified_base 14: mod_base = OTHER; note = 2'-deoxy-2'-fluorouridine-3'-phosphate
  modified_base 15: mod_base = OTHER; note = 2'-O-methylcytidine-3'-phosphate
  modified_base 16: mod_base = OTHER; note = 2'-deoxy-2'-fluorouridine-3'-phosphate
  modified_base 17: mod_base = OTHER; note = 2'-O-methylcytidine-3'-phosphate
  modified_base 18: mod_base = OTHER; note = 2'-O-methyladenosine-3'-phosphate
  modified_base 19: mod_base = OTHER; note = 2'-O-methylguanosine-3'-phosphate
  modified_base 20: mod_base = OTHER; note = 2'-O-methylcytidine-3'-phosphate
  modified_base 21: mod_base = OTHER; note = 2'-O-methylcytidine-3'-phosphorothioate
  modified_base 22: mod_base = OTHER; note = 2'-O-methyluridine-3'-phosphorothioate
  modified_base 23: mod_base = OTHER; note = 2'-O-methyluridine
aacgcctcccacttctcagcctt

SEQ ID NO: 299 - RNA, 23 nt, synthetic construct
  source 1..23: mol_type = other RNA
  modified_base 1: mod_base = OTHER; note = 2'-O-methyluridine-3'-phosphorothioate
  modified_base 2: mod_base = OTHER; note = 2'-deoxy-2'-fluoroguanosine-3'-phosphorothioate
  modified_base 3: mod_base = OTHER; note = 2'-O-methylcytidine-3'-phosphate
  modified_base 4: mod_base = OTHER; note = 2'-O-methyluridine-3'-phosphate
  modified_base 5: mod_base = OTHER; note = 2'-O-methylguanosine-3'-phosphate
  modified_base 6: mod_base = OTHER; note = 2'-O-methyladenosine-3'-phosphate
  modified_base 7: mod_base = OTHER; note = Cytidine-glycol nucleic acid (GNA), S-isomer
  modified_base 8: mod_base = OTHER; note = 2'-O-methyladenosine-3'-phosphate
  modified_base 9: mod_base = OTHER; note = 2'-O-methyladenosine-3'-phosphate
  modified_base 10: mod_base = OTHER; note = 2'-O-methyladenosine-3'-phosphate
  modified_base 11: mod_base = OTHER; note = 2'-O-methylcytidine-3'-phosphate
  modified_base 12: mod_base = OTHER; note = 2'-O-methyladenosine-3'-phosphate
  modified_base 13: mod_base = OTHER; note = 2'-O-methylcytidine-3'-phosphate
  modified_base 14: mod_base = OTHER; note = 2'-deoxy-2'-fluorocytidine-3'-phosphate
  modified_base 15: mod_base = OTHER; note = 2'-O-methyladenosine-3'-phosphate
  modified_base 16: mod_base = OTHER; note = 2'-deoxy-2'-fluorocytidine-3'-phosphate
  modified_base 17: mod_base = OTHER; note = 2'-O-methylguanosine-3'-phosphate
  modified_base 18: mod_base = OTHER; note = 2'-O-methyluridine-3'-phosphate
  modified_base 19: mod_base = OTHER; note = 2'-O-methylcytidine-3'-phosphate
  modified_base 20: mod_base = OTHER; note = 2'-O-methyluridine-3'-phosphate
  modified_base 21: mod_base = OTHER; note = 2'-O-methylcytidine-3'-phosphorothioate
  modified_base 22: mod_base = OTHER; note = 2'-O-methylcytidine-3'-phosphorothioate
  modified_base 23: mod_base = OTHER; note = 2'-O-methylguanosine
tgctgacaaacaccacgtctccg

SEQ ID NO: 300 - RNA, 23 nt, synthetic construct
  source 1..23: mol_type = other RNA
  modified_base 1: mod_base = OTHER; note = 2'-O-methyladenosine-3'-phosphorothioate
  modified_base 2: mod_base = OTHER; note = 2'-deoxy-2'-fluorocytidine-3'-phosphorothioate
  modified_base 3: mod_base = OTHER; note = 2'-O-methylguanosine-3'-phosphate
  modified_base 4: mod_base = OTHER; note = 2'-O-methylcytidine-3'-phosphate
  modified_base 5: mod_base = OTHER; note = 2'-O-methyladenosine-3'-phosphate
  modified_base 6: mod_base = OTHER; note = 2'-O-methylcytidine-3'-phosphate
  modified_base 7: mod_base = OTHER; note = Adenosine-glycol nucleic acid (GNA), S-isomer
  modified_base 8: mod_base = OTHER; note = 2'-O-methylguanosine-3'-phosphate
  modified_base 9: mod_base = OTHER; note = 2'-O-methylguanosine-3'-phosphate
  modified_base 10: mod_base = OTHER; note = 2'-O-methyladenosine-3'-phosphate
  modified_base 11: mod_base = OTHER; note = 2'-O-methyluridine-3'-phosphate
  modified_base 12: mod_base = OTHER; note = 2'-O-methylcytidine-3'-phosphate
  modified_base 13: mod_base = OTHER; note = 2'-O-methyluridine-3'-phosphate
  modified_base 14: mod_base = OTHER; note = 2'-deoxy-2'-fluoroguanosine-3'-phosphate
  modified_base 15: mod_base = OTHER; note = 2'-O-methylcytidine-3'-phosphate
  modified_base 16: mod_base = OTHER; note = 2'-deoxy-2'-fluorouridine-3'-phosphate
  modified_base 17: mod_base = OTHER; note = 2'-O-methyluridine-3'-phosphate
  modified_base 18: mod_base = OTHER; note = 2'-O-methylcytidine-3'-phosphate
  modified_base 19: mod_base = OTHER; note = 2'-O-methyluridine-3'-phosphate
  modified_base 20: mod_base = OTHER; note = 2'-O-methylcytidine-3'-phosphate
  modified_base 21: mod_base = OTHER; note = 2'-O-methyluridine-3'-phosphorothioate
  modified_base 22: mod_base = OTHER; note = 2'-O-methyluridine-3'-phosphorothioate
  modified_base 23: mod_base = OTHER; note = 2'-O-methylcytidine
acgcacaggatctgcttctcttc

SEQ ID NO: 301 - RNA, 23 nt, synthetic construct
  source 1..23: mol_type = other RNA
  modified_base 1: mod_base = OTHER; note = 2'-O-methyladenosine-3'-phosphorothioate
  modified_base 2: mod_base = OTHER; note = 2'-deoxy-2'-fluorouridine-3'-phosphorothioate
  modified_base 3: mod_base = OTHER; note = 2'-O-methylcytidine-3'-phosphate
  modified_base 4: mod_base = OTHER; note = 2'-O-methylguanosine-3'-phosphate
  modified_base 5: mod_base = OTHER; note = 2'-O-methyladenosine-3'-phosphate
  modified_base 6: mod_base = OTHER; note = 2'-O-methylguanosine-3'-phosphate
  modified_base 7: mod_base = OTHER; note = Adenosine-glycol nucleic acid (GNA), S-isomer
  modified_base 8: mod_base = OTHER; note = 2'-O-methyladenosine-3'-phosphate
  modified_base 9: mod_base = OTHER; note = 2'-O-methyluridine-3'-phosphate
  modified_base 10: mod_base = OTHER; note = 2'-O-methylguanosine-3'-phosphate
  modified_base 11: mod_base = OTHER; note = 2'-O-methylcytidine-3'-phosphate
  modified_base 12: mod_base = OTHER; note = 2'-O-methyladenosine-3'-phosphate
  modified_base 13: mod_base = OTHER; note = 2'-O-methyladenosine-3'-phosphate
  modified_base 14: mod_base = OTHER; note = 2'-deoxy-2'-fluoroadenosine-3'-phosphate
  modified_base 15: mod_base = OTHER; note = 2'-O-methylguanosine-3'-phosphate
  modified_base 16: mod_base = OTHER; note = 2'-deoxy-2'-fluoroadenosine-3'-phosphate
  modified_base 17: mod_base = OTHER; note = 2'-O-methylguanosine-3'-phosphate
  modified_base 18: mod_base = OTHER; note = 2'-O-methyladenosine-3'-phosphate
  modified_base 19: mod_base = OTHER; note = 2'-O-methyladenosine-3'-phosphate
  modified_base 20: mod_base = OTHER; note = 2'-O-methyladenosine-3'-phosphate
  modified_base 21: mod_base = OTHER; note = 2'-O-methyladenosine-3'-phosphorothioate
  modified_base 22: mod_base = OTHER; note = 2'-O-methyluridine-3'-phosphorothioate
  modified_base 23: mod_base = OTHER; note = 2'-O-methylguanosine
atcgagaatgcaaagagaaaatg

SEQ ID NO: 302 - RNA, 23 nt, synthetic construct
  source 1..23: mol_type = other RNA
  modified_base 1: mod_base = OTHER; note = 2'-O-methyladenosine-3'-phosphorothioate
  modified_base 2: mod_base = OTHER; note = 2'-deoxy-2'-fluorouridine-3'-phosphorothioate
  modified_base 3: mod_base = OTHER; note = 2'-O-methyluridine-3'-phosphate
  modified_base 4: mod_base = OTHER; note = 2'-O-methyladenosine-3'-phosphate
  modified_base 5: mod_base = OTHER; note = 2'-O-methyladenosine-3'-phosphate
  modified_base 6: mod_base = OTHER; note = 2'-O-methyluridine-3'-phosphate
  modified_base 7: mod_base = OTHER; note = Thymidine-glycol nucleic acid (GNA), S-Isomer
  modified_base 8: mod_base = OTHER; note = 2'-O-methylcytidine-3'-phosphate
  modified_base 9: mod_base = OTHER; note = 2'-O-methylcytidine-3'-phosphate
  modified_base 10: mod_base = OTHER; note = 2'-O-methyladenosine-3'-phosphate
  modified_base 11: mod_base = OTHER; note = 2'-O-methyladenosine-3'-phosphate
  modified_base 12: mod_base = OTHER; note = 2'-O-methylguanosine-3'-phosphate
  modified_base 13: mod_base = OTHER; note = 2'-O-methylguanosine-3'-phosphate
  modified_base 14: mod_base = OTHER; note = 2'-deoxy-2'-fluorouridine-3'-phosphate
  modified_base 15: mod_base = OTHER; note = 2'-O-methylguanosine-3'-phosphate
  modified_base 16: mod_base = OTHER; note = 2'-deoxy-2'-fluoroguanosine-3'-phosphate
  modified_base 17: mod_base = OTHER; note = 2'-O-methylguanosine-3'-phosphate
  modified_base 18: mod_base = OTHER; note = 2'-O-methylcytidine-3'-phosphate
  modified_base 19: mod_base = OTHER; note = 2'-O-methyluridine-3'-phosphate
  modified_base 20: mod_base = OTHER; note = 2'-O-methylcytidine-3'-phosphate
  modified_base 21: mod_base = OTHER; note = 2'-O-methylcytidine-3'-phosphorothioate
  modified_base 22: mod_base = OTHER; note = 2'-O-methyladenosine-3'-phosphorothioate
  modified_base 23: mod_base = OTHER; note = 2'-O-methyladenosine
attaattccaaggtgggctccaa

SEQ ID NO: 303 - RNA, 23 nt, synthetic construct
  source 1..23: mol_type = other RNA
  modified_base 1: mod_base = OTHER; note = 2'-O-methyladenosine-3'-phosphorothioate
  modified_base 2: mod_base = OTHER; note = 2'-deoxy-2'-fluoroadenosine-3'-phosphorothioate
  modified_base 3: mod_base = OTHER; note = 2'-O-methylguanosine-3'-phosphate
  modified_base 4: mod_base = OTHER; note = 2'-O-methylcytidine-3'-phosphate
  modified_base 5: mod_base = OTHER; note = 2'-O-methylguanosine-3'-phosphate
  modified_base 6: mod_base = OTHER; note = 2'-O-methyladenosine-3'-phosphate
  modified_base 7: mod_base = OTHER; note = Thymidine-glycol nucleic acid (GNA), S-Isomer
  modified_base 8: mod_base = OTHER; note = 2'-O-methylcytidine-3'-phosphate
  modified_base 9: mod_base = OTHER; note = 2'-O-methyluridine-3'-phosphate
  modified_base 10: mod_base = OTHER; note = 2'-O-methylcytidine-3'-phosphate
  modified_base 11: mod_base = OTHER; note = 2'-O-methylguanosine-3'-phosphate
  modified_base 12: mod_base = OTHER; note = 2'-O-methyladenosine-3'-phosphate
  modified_base 13: mod_base = OTHER; note = 2'-O-methylguanosine-3'-phosphate
  modified_base 14: mod_base = OTHER; note = 2'-deoxy-2'-fluoroadenosine-3'-phosphate
  modified_base 15: mod_base = OTHER; note = 2'-O-methyladenosine-3'-phosphate
  modified_base 16: mod_base = OTHER; note = 2'-deoxy-2'-fluorouridine-3'-phosphate
  modified_base 17: mod_base = OTHER; note = 2'-O-methylguanosine-3'-phosphate
  modified_base 18: mod_base = OTHER; note = 2'-O-methylcytidine-3'-phosphate
  modified_base 19: mod_base = OTHER; note = 2'-O-methyladenosine-3'-phosphate
  modified_base 20: mod_base = OTHER; note = 2'-O-methyladenosine-3'-phosphate
  modified_base 21: mod_base = OTHER; note = 2'-O-methyladenosine-3'-phosphorothioate
  modified_base 22: mod_base = OTHER; note = 2'-O-methylguanosine-3'-phosphorothioate
  modified_base 23: mod_base = OTHER; note = 2'-O-methyladenosine
aagcgatctcgagaatgcaaaga

SEQ ID NO: 304 - RNA, 23 nt, synthetic construct
  source 1..23: mol_type = other RNA
  modified_base 1: mod_base = OTHER; note = 2'-O-methyladenosine-3'-phosphorothioate
  modified_base 2: mod_base = OTHER; note = 2'-deoxy-2'-fluoroguanosine-3'-phosphorothioate
  modified_base 3: mod_base = OTHER; note = 2'-O-methylguanosine-3'-phosphate
  modified_base 4: mod_base = OTHER; note = 2'-O-methylguanosine-3'-phosphate
  modified_base 5: mod_base = OTHER; note = 2'-O-methyladenosine-3'-phosphate
  modified_base 6: mod_base = OTHER; note = 2'-O-methyladenosine-3'-phosphate
  modified_base 7: mod_base = OTHER; note = Adenosine-glycol nucleic acid (GNA), S-isomer
  modified_base 8: mod_base = OTHER; note = 2'-O-methylguanosine-3'-phosphate
  modified_base 9: mod_base = OTHER; note = 2'-O-methylcytidine-3'-phosphate
  modified_base 10: mod_base = OTHER; note = 2'-O-methyladenosine-3'-phosphate
  modified_base 11: mod_base = OTHER; note = 2'-O-methyluridine-3'-phosphate
  modified_base 12: mod_base = OTHER; note = 2'-O-methylcytidine-3'-phosphate
  modified_base 13: mod_base = OTHER; note = 2'-O-methylcytidine-3'-phosphate
  modified_base 14: mod_base = OTHER; note = 2'-deoxy-2'-fluoroguanosine-3'-phosphate
  modified_base 15: mod_base = OTHER; note = 2'-O-methyladenosine-3'-phosphate
  modified_base 16: mod_base = OTHER; note = 2'-deoxy-2'-fluoroguanosine-3'-phosphate
  modified_base 17: mod_base = OTHER; note = 2'-O-methyluridine-3'-phosphate
  modified_base 18: mod_base = OTHER; note = 2'-O-methylguanosine-3'-phosphate
  modified_base 19: mod_base = OTHER; note = 2'-O-methylguanosine-3'-phosphate
  modified_base 20: mod_base = OTHER; note = 2'-O-methyladenosine-3'-phosphate
  modified_base 21: mod_base = OTHER; note = 2'-O-methylguanosine-3'-phosphorothioate
  modified_base 22: mod_base = OTHER; note = 2'-O-methylcytidine-3'-phosphorothioate
  modified_base 23: mod_base = OTHER; note = 2'-O-methyladenosine
agggaaagcatccgagtggagca

SEQ ID NO: 305 - RNA, 23 nt, synthetic construct
  source 1..23: mol_type = other RNA
  modified_base 1: mod_base = OTHER; note = 2'-O-methyladenosine-3'-phosphorothioate
  modified_base 2: mod_base = OTHER; note = 2'-deoxy-2'-fluorocytidine-3'-phosphorothioate
  modified_base 3: mod_base = OTHER; note = 2'-O-methyluridine-3'-phosphate
  modified_base 4: mod_base = OTHER; note = 2'-O-methylcytidine-3'-phosphate
  modified_base 5: mod_base = OTHER; note = 2'-O-methyladenosine-3'-phosphate
  modified_base 6: mod_base = OTHER; note = 2'-O-methylcytidine-3'-phosphate
  modified_base 7: mod_base = OTHER; note = Adenosine-glycol nucleic acid (GNA), S-isomer
  modified_base 8: mod_base = OTHER; note = 2'-O-methylcytidine-3'-phosphate
  modified_base 9: mod_base = OTHER; note = 2'-O-methylguanosine-3'-phosphate
  modified_base 10: mod_base = OTHER; note = 2'-O-methyladenosine-3'-phosphate
  modified_base 11: mod_base = OTHER; note = 2'-O-methylcytidine-3'-phosphate
  modified_base 12: mod_base = OTHER; note = 2'-O-methylcytidine-3'-phosphate
  modified_base 13: mod_base = OTHER; note = 2'-O-methyladenosine-3'-phosphate
  modified_base 14: mod_base = OTHER; note = 2'-deoxy-2'-fluorouridine-3'-phosphate
  modified_base 15: mod_base = OTHER; note = 2'-O-methyladenosine-3'-phosphate
  modified_base 16: mod_base = OTHER; note = 2'-deoxy-2'-fluorocytidine-3'-phosphate
  modified_base 17: mod_base = OTHER; note = 2'-O-methyladenosine-3'-phosphate
  modified_base 18: mod_base = OTHER; note = 2'-O-methyladenosine-3'-phosphate
  modified_base 19: mod_base = OTHER; note = 2'-O-methylguanosine-3'-phosphate
  modified_base 20: mod_base = OTHER; note = 2'-O-methylcytidine-3'-phosphate
  modified_base 21: mod_base = OTHER; note = 2'-O-methylcytidine-3'-phosphorothioate
  modified_base 22: mod_base = OTHER; note = 2'-O-methylcytidine-3'-phosphorothioate
  modified_base 23: mod_base = OTHER; note = 2'-O-methylcytidine
actcacacgaccatacaagcccc

SEQ ID NO: 306 - RNA, 23 nt, synthetic construct
  source 1..23: mol_type = other RNA
  modified_base 1: mod_base = OTHER; note = 2'-O-methyladenosine-3'-phosphorothioate
  modified_base 2: mod_base = OTHER; note = 2'-deoxy-2'-fluoroadenosine-3'-phosphorothioate
  modified_base 3: mod_base = OTHER; note = 2'-O-methyladenosine-3'-phosphate
  modified_base 4: mod_base = OTHER; note = 2'-O-methylcytidine-3'-phosphate
  modified_base 5: mod_base = OTHER; note = 2'-O-methyladenosine-3'-phosphate
  modified_base 6: mod_base = OTHER; note = 2'-O-methylcytidine-3'-phosphate
  modified_base 7: mod_base = OTHER; note = Cytidine-glycol nucleic acid (GNA), S-isomer
  modified_base 8: mod_base = OTHER; note = 2'-O-methyladenosine-3'-phosphate
  modified_base 9: mod_base = OTHER; note = 2'-O-methylcytidine-3'-phosphate
  modified_base 10: mod_base = OTHER; note = 2'-O-methylguanosine-3'-phosphate
  modified_base 11: mod_base = OTHER; note = 2'-O-methyluridine-3'-phosphate
  modified_base 12: mod_base = OTHER; note = 2'-O-methylcytidine-3'-phosphate
  modified_base 13: mod_base = OTHER; note = 2'-O-methyluridine-3'-phosphate
  modified_base 14: mod_base = OTHER; note = 2'-deoxy-2'-fluorocytidine-3'-phosphate
  modified_base 15: mod_base = OTHER; note = 2'-O-methylcytidine-3'-phosphate
  modified_base 16: mod_base = OTHER; note = 2'-deoxy-2'-fluoroguanosine-3'-phosphate
  modified_base 17: mod_base = OTHER; note = 2'-O-methyluridine-3'-phosphate
  modified_base 18: mod_base = OTHER; note = 2'-O-methyladenosine-3'-phosphate
  modified_base 19: mod_base = OTHER; note = 2'-O-methylguanosine-3'-phosphate
  modified_base 20: mod_base = OTHER; note = 2'-O-methylcytidine-3'-phosphate
  modified_base 21: mod_base = OTHER; note = 2'-O-methylcytidine-3'-phosphorothioate
  modified_base 22: mod_base = OTHER; note = 2'-O-methyladenosine-3'-phosphorothioate
  modified_base 23: mod_base = OTHER; note = 2'-O-methyladenosine
aaacaccacgtctccgtagccaa

SEQ ID NO: 307 - RNA, 23 nt, synthetic construct
  source 1..23: mol_type = other RNA
  modified_base 1: mod_base = OTHER; note = 2'-O-methyladenosine-3'-phosphorothioate
  modified_base 2: mod_base = OTHER; note = 2'-deoxy-2'-fluoroguanosine-3'-phosphorothioate
  modified_base 3: mod_base = OTHER; note = 2'-O-methylguanosine-3'-phosphate
  modified_base 4: mod_base = OTHER; note = 2'-O-methyluridine-3'-phosphate
  modified_base 5: mod_base = OTHER; note = 2'-O-methylcytidine-3'-phosphate
  modified_base 6: mod_base = OTHER; note = 2'-O-methyladenosine-3'-phosphate
  modified_base 7: mod_base = OTHER; note = Guanosine-glycol nucleic acid (GNA), S-isomer
  modified_base 8: mod_base = OTHER; note = 2'-O-methyladenosine-3'-phosphate
  modified_base 9: mod_base = OTHER; note = 2'-O-methyluridine-3'-phosphate
  modified_base 10: mod_base = OTHER; note = 2'-O-methylcytidine-3'-phosphate
  modified_base 11: mod_base = OTHER; note = 2'-O-methyladenosine-3'-phosphate
  modified_base 12: mod_base = OTHER; note = 2'-O-methyladenosine-3'-phosphate
  modified_base 13: mod_base = OTHER; note = 2'-O-methylcytidine-3'-phosphate
  modified_base 14: mod_base = OTHER; note = 2'-deoxy-2'-fluorocytidine-3'-phosphate
  modified_base 15: mod_base = OTHER; note = 2'-O-methyluridine-3'-phosphate
  modified_base 16: mod_base = OTHER; note = 2'-deoxy-2'-fluorouridine-3'-phosphate
  modified_base 17: mod_base = OTHER; note = 2'-O-methylcytidine-3'-phosphate
  modified_base 18: mod_base = OTHER; note = 2'-O-methyluridine-3'-phosphate
  modified_base 19: mod_base = OTHER; note = 2'-O-methylcytidine-3'-phosphate
  modified_base 20: mod_base = OTHER; note = 2'-O-methyladenosine-3'-phosphate
  modified_base 21: mod_base = OTHER; note = 2'-O-methyladenosine-3'-phosphorothioate
  modified_base 22: mod_base = OTHER; note = 2'-O-methyladenosine-3'-phosphorothioate
  modified_base 23: mod_base = OTHER; note = 2'-O-methylguanosine
aggtcagatcaaccttctcaaag

SEQ ID NO: 308 - RNA, 23 nt, synthetic construct
  source 1..23: mol_type = other RNA
  modified_base 1: mod_base = OTHER; note = 2'-O-methyladenosine-3'-phosphorothioate
  modified_base 2: mod_base = OTHER; note = 2'-deoxy-2'-fluorocytidine-3'-phosphorothioate
  modified_base 3: mod_base = OTHER; note = 2'-O-methyluridine-3'-phosphate
  modified_base 4: mod_base = OTHER; note = 2'-O-methyluridine-3'-phosphate
  modified_base 5: mod_base = OTHER; note = 2'-O-methyladenosine-3'-phosphate
  modified_base 6: mod_base = OTHER; note = 2'-O-methyladenosine-3'-phosphate
  modified_base 7: mod_base = OTHER; note = Thymidine-glycol nucleic acid (GNA), S-Isomer
  modified_base 8: mod_base = OTHER; note = 2'-O-methyluridine-3'-phosphate
  modified_base 9: mod_base = OTHER; note = 2'-O-methylcytidine-3'-phosphate
  modified_base 10: mod_base = OTHER; note = 2'-O-methylcytidine-3'-phosphate
  modified_base 11: mod_base = OTHER; note = 2'-O-methyladenosine-3'-phosphate
  modified_base 12: mod_base = OTHER; note = 2'-O-methyladenosine-3'-phosphate
  modified_base 13: mod_base = OTHER; note = 2'-O-methylguanosine-3'-phosphate
  modified_base 14: mod_base = OTHER; note = 2'-deoxy-2'-fluoroguanosine-3'-phosphate
  modified_base 15: mod_base = OTHER; note = 2'-O-methyluridine-3'-phosphate
  modified_base 16: mod_base = OTHER; note = 2'-deoxy-2'-fluoroguanosine-3'-phosphate
  modified_base 17: mod_base = OTHER; note = 2'-O-methylguanosine-3'-phosphate
  modified_base 18: mod_base = OTHER; note = 2'-O-methylguanosine-3'-phosphate
  modified_base 19: mod_base = OTHER; note = 2'-O-methylcytidine-3'-phosphate
  modified_base 20: mod_base = OTHER; note = 2'-O-methyluridine-3'-phosphate
  modified_base 21: mod_base = OTHER; note = 2'-O-methylcytidine-3'-phosphorothioate
  modified_base 22: mod_base = OTHER; note = 2'-O-methylcytidine-3'-phosphorothioate
  modified_base 23: mod_base = OTHER; note = 2'-O-methyladenosine
acttaattccaaggtgggctcca

SEQ ID NO: 309 - RNA, 23 nt, synthetic construct
  source 1..23: mol_type = other RNA
  modified_base 1: mod_base = OTHER; note = 2'-O-methyladenosine-3'-phosphorothioate
  modified_base 2: mod_base = OTHER; note = 2'-deoxy-2'-fluorouridine-3'-phosphorothioate
  modified_base 3: mod_base = OTHER; note = 2'-O-methylcytidine-3'-phosphate
  modified_base 4: mod_base = OTHER; note = 2'-O-methyladenosine-3'-phosphate
  modified_base 5: mod_base = OTHER; note = 2'-O-methylguanosine-3'-phosphate
  modified_base 6: mod_base = OTHER; note = 2'-O-methylcytidine-3'-phosphate
  modified_base 7: mod_base = OTHER; note = Cytidine-glycol nucleic acid (GNA), S-isomer
  modified_base 8: mod_base = OTHER; note = 2'-O-methylcytidine-3'-phosphate
  modified_base 9: mod_base = OTHER; note = 2'-O-methyladenosine-3'-phosphate
  modified_base 10: mod_base = OTHER; note = 2'-O-methylguanosine-3'-phosphate
  modified_base 11: mod_base = OTHER; note = 2'-O-methylguanosine-3'-phosphate
  modified_base 12: mod_base = OTHER; note = 2'-O-methylcytidine-3'-phosphate
  modified_base 13: mod_base = OTHER; note = 2'-O-methyladenosine-3'-phosphate
  modified_base 14: mod_base = OTHER; note = 2'-deoxy-2'-fluorocytidine-3'-phosphate
  modified_base 15: mod_base = OTHER; note = 2'-O-methyladenosine-3'-phosphate
  modified_base 16: mod_base = OTHER; note = 2'-deoxy-2'-fluoroguanosine-3'-phosphate
  modified_base 17: mod_base = OTHER; note = 2'-O-methyladenosine-3'-phosphate
  modified_base 18: mod_base = OTHER; note = 2'-O-methylcytidine-3'-phosphate
  modified_base 19: mod_base = OTHER; note = 2'-O-methyladenosine-3'-phosphate
  modified_base 20: mod_base = OTHER; note = 2'-O-methyladenosine-3'-phosphate
  modified_base 21: mod_base = OTHER; note = 2'-O-methylguanosine-3'-phosphorothioate
  modified_base 22: mod_base = OTHER; note = 2'-O-methylcytidine-3'-phosphorothioate
  modified_base 23: mod_base = OTHER; note = 2'-O-methyladenosine
atcagcccaggcacagacaagca

SEQ ID NO: 310 - RNA, 23 nt, synthetic construct
  source 1..23: mol_type = other RNA
  modified_base 1: mod_base = OTHER; note = 2'-O-methyladenosine-3'-phosphorothioate
  modified_base 2: mod_base = OTHER; note = 2'-deoxy-2'-fluorocytidine-3'-phosphorothioate
  modified_base 3: mod_base = OTHER; note = 2'-O-methylguanosine-3'-phosphate
  modified_base 4: mod_base = OTHER; note = 2'-O-methyladenosine-3'-phosphate
  modified_base 5: mod_base = OTHER; note = 2'-O-methyluridine-3'-phosphate
  modified_base 6: mod_base = OTHER; note = 2'-O-methylcytidine-3'-phosphate
  modified_base 7: mod_base = OTHER; note = Thymidine-glycol nucleic acid (GNA), S-Isomer
  modified_base 8: mod_base = OTHER; note = 2'-O-methylcytidine-3'-phosphate
  modified_base 9: mod_base = OTHER; note = 2'-O-methylguanosine-3'-phosphate
  modified_base 10: mod_base = OTHER; note = 2'-O-methyladenosine-3'-phosphate
  modified_base 11: mod_base = OTHER; note = 2'-O-methylguanosine-3'-phosphate
  modified_base 12: mod_base = OTHER; note = 2'-O-methyladenosine-3'-phosphate
  modified_base 13: mod_base = OTHER; note = 2'-O-methyladenosine-3'-phosphate
  modified_base 14: mod_base = OTHER; note = 2'-deoxy-2'-fluorouridine-3'-phosphate
  modified_base 15: mod_base = OTHER; note = 2'-O-methylguanosine-3'-phosphate
  modified_base 16: mod_base = OTHER; note = 2'-deoxy-2'-fluorocytidine-3'-phosphate
  modified_base 17: mod_base = OTHER; note = 2'-O-methyladenosine-3'-phosphate
  modified_base 18: mod_base = OTHER; note = 2'-O-methyladenosine-3'-phosphate
  modified_base 19: mod_base = OTHER; note = 2'-O-methyladenosine-3'-phosphate
  modified_base 20: mod_base = OTHER; note = 2'-O-methylguanosine-3'-phosphate
  modified_base 21: mod_base = OTHER; note = 2'-O-methyladenosine-3'-phosphorothioate
  modified_base 22: mod_base = OTHER; note = 2'-O-methylguanosine-3'-phosphorothioate
  modified_base 23: mod_base = OTHER; note = 2'-O-methyladenosine
acgatctcgagaatgcaaagaga

SEQ ID NO: 311 - RNA, 23 nt, synthetic construct
  source 1..23: mol_type = other RNA
  modified_base 1: mod_base = OTHER; note = 2'-O-methyladenosine-3'-phosphorothioate
  modified_base 2: mod_base = OTHER; note = 2'-deoxy-2'-fluorocytidine-3'-phosphorothioate
  modified_base 3: mod_base = OTHER; note = 2'-O-methylguanosine-3'-phosphate
  modified_base 4: mod_base = OTHER; note = 2'-O-methyladenosine-3'-phosphate
  modified_base 5: mod_base = OTHER; note = 2'-O-methyladenosine-3'-phosphate
  modified_base 6: mod_base = OTHER; note = 2'-O-methyluridine-3'-phosphate
  modified_base 7: mod_base = OTHER; note = Cytidine-glycol nucleic acid (GNA), S-isomer
  modified_base 8: mod_base = OTHER; note = 2'-O-methyluridine-3'-phosphate
  modified_base 9: mod_base = OTHER; note = 2'-O-methylcytidine-3'-phosphate
  modified_base 10: mod_base = OTHER; note = 2'-O-methyladenosine-3'-phosphate
  modified_base 11: mod_base = OTHER; note = 2'-O-methylguanosine-3'-phosphate
  modified_base 12: mod_base = OTHER; note = 2'-O-methyluridine-3'-phosphate
  modified_base 13: mod_base = OTHER; note = 2'-O-methylguanosine-3'-phosphate
  modified_base 14: mod_base = OTHER; note = 2'-deoxy-2'-fluorocytidine-3'-phosphate
  modified_base 15: mod_base = OTHER; note = 2'-O-methyluridine-3'-phosphate
  modified_base 16: mod_base = OTHER; note = 2'-deoxy-2'-fluorouridine-3'-phosphate
  modified_base 17: mod_base = OTHER; note = 2'-O-methylcytidine-3'-phosphate
  modified_base 18: mod_base = OTHER; note = 2'-O-methylcytidine-3'-phosphate
  modified_base 19: mod_base = OTHER; note = 2'-O-methyluridine-3'-phosphate
  modified_base 20: mod_base = OTHER; note = 2'-O-methylguanosine-3'-phosphate
  modified_base 21: mod_base = OTHER; note = 2'-O-methylcytidine-3'-phosphorothioate
  modified_base 22: mod_base = OTHER; note = 2'-O-methyladenosine-3'-phosphorothioate
  modified_base 23: mod_base = OTHER; note = 2'-O-methylcytidine
acgaatctcagtgcttcctgcac

SEQ ID NO: 312 - RNA, 23 nt, synthetic construct
  source 1..23: mol_type = other RNA
  modified_base 1: mod_base = OTHER; note = 2'-O-methyladenosine-3'-phosphorothioate
  modified_base 2: mod_base = OTHER; note = 2'-deoxy-2'-fluorocytidine-3'-phosphorothioate
  modified_base 3: mod_base = OTHER; note = 2'-O-methylguanosine-3'-phosphate
  modified_base 4: mod_base = OTHER; note = 2'-O-methylcytidine-3'-phosphate
  modified_base 5: mod_base = OTHER; note = 2'-O-methylguanosine-3'-phosphate
  modified_base 6: mod_base = OTHER; note = 2'-O-methylguanosine-3'-phosphate
  modified_base 7: mod_base = OTHER; note = Cytidine-glycol nucleic acid (GNA), S-isomer
  modified_base 8: mod_base = OTHER; note = 2'-O-methyluridine-3'-phosphate
  modified_base 9: mod_base = OTHER; note = 2'-O-methyladenosine-3'-phosphate
  modified_base 10: mod_base = OTHER; note = 2'-O-methyladenosine-3'-phosphate
  modified_base 11: mod_base = OTHER; note = 2'-O-methylguanosine-3'-phosphate
  modified_base 12: mod_base = OTHER; note = 2'-O-methylcytidine-3'-phosphate
  modified_base 13: mod_base = OTHER; note = 2'-O-methylguanosine-3'-phosphate
  modified_base 14: mod_base = OTHER; note = 2'-deoxy-2'-fluoroadenosine-3'-phosphate
  modified_base 15: mod_base = OTHER; note = 2'-O-methyluridine-3'-phosphate
  modified_base 16: mod_base = OTHER; note = 2'-deoxy-2'-fluorocytidine-3'-phosphate
  modified_base 17: mod_base = OTHER; note = 2'-O-methyluridine-3'-phosphate
  modified_base 18: mod_base = OTHER; note = 2'-O-methylcytidine-3'-phosphate
  modified_base 19: mod_base = OTHER; note = 2'-O-methylguanosine-3'-phosphate
  modified_base 20: mod_base = OTHER; note = 2'-O-methyladenosine-3'-phosphate
  modified_base 21: mod_base = OTHER; note = 2'-O-methylguanosine-3'-phosphorothioate
  modified_base 22: mod_base = OTHER; note = 2'-O-methyladenosine-3'-phosphorothioate
  modified_base 23: mod_base = OTHER; note = 2'-O-methyladenosine
acgcggctaagcgatctcgagaa

SEQ ID NO: 313 - RNA, 23 nt, synthetic construct
  source 1..23: mol_type = other RNA
  modified_base 1: mod_base = OTHER; note = 2'-O-methyladenosine-3'-phosphorothioate
  modified_base 2: mod_base = OTHER; note = 2'-deoxy-2'-fluoroguanosine-3'-phosphorothioate
  modified_base 3: mod_base = OTHER; note = 2'-O-methyladenosine-3'-phosphate
  modified_base 4: mod_base = OTHER; note = 2'-O-methylguanosine-3'-phosphate
  modified_base 5: mod_base = OTHER; note = 2'-O-methylguanosine-3'-phosphate
  modified_base 6: mod_base = OTHER; note = 2'-O-methylcytidine-3'-phosphate
  modified_base 7: mod_base = OTHER; note = Adenosine-glycol nucleic acid (GNA), S-isomer
  modified_base 8: mod_base = OTHER; note = 2'-O-methyluridine-3'-phosphate
  modified_base 9: mod_base = OTHER; note = 2'-O-methyluridine-3'-phosphate
  modified_base 10: mod_base = OTHER; note = 2'-O-methylguanosine-3'-phosphate
  modified_base 11: mod_base = OTHER; note = 2'-O-methyladenosine-3'-phosphate
  modified_base 12: mod_base = OTHER; note = 2'-O-methyladenosine-3'-phosphate
  modified_base 13: mod_base = OTHER; note = 2'-O-methylguanosine-3'-phosphate
  modified_base 14: mod_base = OTHER; note = 2'-deoxy-2'-fluoroguanosine-3'-phosphate
  modified_base 15: mod_base = OTHER; note = 2'-O-methyluridine-3'-phosphate
  modified_base 16: mod_base = OTHER; note = 2'-deoxy-2'-fluoroguanosine-3'-phosphate
  modified_base 17: mod_base = OTHER; note = 2'-O-methyluridine-3'-phosphate
  modified_base 18: mod_base = OTHER; note = 2'-O-methylcytidine-3'-phosphate
  modified_base 19: mod_base = OTHER; note = 2'-O-methyluridine-3'-phosphate
  modified_base 20: mod_base = OTHER; note = 2'-O-methylcytidine-3'-phosphate
  modified_base 21: mod_base = OTHER; note = 2'-O-methylcytidine-3'-phosphorothioate
  modified_base 22: mod_base = OTHER; note = 2'-O-methyladenosine-3'-phosphorothioate
  modified_base 23: mod_base = OTHER; note = 2'-O-methylguanosine
agaggcattgaaggtgtctccag

SEQ ID NO: 314 - RNA, 23 nt, synthetic construct
  source 1..23: mol_type = other RNA
  modified_base 1: mod_base = OTHER; note = 2'-O-methyladenosine-3'-phosphorothioate
  modified_base 2: mod_base = OTHER; note = 2'-deoxy-2'-fluoroguanosine-3'-phosphorothioate
  modified_base 3: mod_base = OTHER; note = 2'-O-methylcytidine-3'-phosphate
  modified_base 4: mod_base = OTHER; note = 2'-O-methylguanosine-3'-phosphate
  modified_base 5: mod_base = OTHER; note = 2'-O-methyladenosine-3'-phosphate
  modified_base 6: mod_base = OTHER; note = 2'-O-methyluridine-3'-phosphate
  modified_base 7: mod_base = OTHER; note = Cytidine-glycol nucleic acid (GNA), S-isomer
  modified_base 8: mod_base = OTHER; note = 2'-O-methyluridine-3'-phosphate
  modified_base 9: mod_base = OTHER; note = 2'-O-methylcytidine-3'-phosphate
  modified_base 10: mod_base = OTHER; note = 2'-O-methylguanosine-3'-phosphate
  modified_base 11: mod_base = OTHER; note = 2'-O-methyladenosine-3'-phosphate
  modified_base 12: mod_base = OTHER; note = 2'-O-methylguanosine-3'-phosphate
  modified_base 13: mod_base = OTHER; note = 2'-O-methyladenosine-3'-phosphate
  modified_base 14: mod_base = OTHER; note = 2'-deoxy-2'-fluoroadenosine-3'-phosphate
  modified_base 15: mod_base = OTHER; note = 2'-O-methyluridine-3'-phosphate
  modified_base 16: mod_base = OTHER; note = 2'-deoxy-2'-fluoroguanosine-3'-phosphate
  modified_base 17: mod_base = OTHER; note = 2'-O-methylcytidine-3'-phosphate
  modified_base 18: mod_base = OTHER; note = 2'-O-methyladenosine-3'-phosphate
  modified_base 19: mod_base = OTHER; note = 2'-O-methyladenosine-3'-phosphate
  modified_base 20: mod_base = OTHER; note = 2'-O-methyladenosine-3'-phosphate
  modified_base 21: mod_base = OTHER; note = 2'-O-methylguanosine-3'-phosphorothioate
  modified_base 22: mod_base = OTHER; note = 2'-O-methyladenosine-3'-phosphorothioate
  modified_base 23: mod_base = OTHER; note = 2'-O-methylguanosine
agcgatctcgagaatgcaaagag

SEQ ID NO: 315 - RNA, 23 nt, synthetic construct
  source 1..23: mol_type = other RNA
  modified_base 1: mod_base = OTHER; note = 2'-O-methyladenosine-3'-phosphorothioate
  modified_base 2: mod_base = OTHER; note = 2'-deoxy-2'-fluorocytidine-3'-phosphorothioate
  modified_base 3: mod_base = OTHER; note = 2'-O-methylguanosine-3'-phosphate
  modified_base 4: mod_base = OTHER; note = 2'-O-methylguanosine-3'-phosphate
  modified_base 5: mod_base = OTHER; note = 2'-O-methylcytidine-3'-phosphate
  modified_base 6: mod_base = OTHER; note = 2'-O-methylcytidine-3'-phosphate
  modified_base 7: mod_base = OTHER; note = Cytidine-glycol nucleic acid (GNA), S-isomer
  modified_base 8: mod_base = OTHER; note = 2'-O-methyluridine-3'-phosphate
  modified_base 9: mod_base = OTHER; note = 2'-O-methylcytidine-3'-phosphate
  modified_base 10: mod_base = OTHER; note = 2'-O-methyladenosine-3'-phosphate
  modified_base 11: mod_base = OTHER; note = 2'-O-methyladenosine-3'-phosphate
  modified_base 12: mod_base = OTHER; note = 2'-O-methyluridine-3'-phosphate
  modified_base 13: mod_base = OTHER; note = 2'-O-methylguanosine-3'-phosphate
  modified_base 14: mod_base = OTHER; note = 2'-deoxy-2'-fluorouridine-3'-phosphate
  modified_base 15: mod_base = OTHER; note = 2'-O-methylguanosine-3'-phosphate
  modified_base 16: mod_base = OTHER; note = 2'-deoxy-2'-fluoroguanosine-3'-phosphate
  modified_base 17: mod_base = OTHER; note = 2'-O-methyladenosine-3'-phosphate
  modified_base 18: mod_base = OTHER; note = 2'-O-methyluridine-3'-phosphate
  modified_base 19: mod_base = OTHER; note = 2'-O-methylcytidine-3'-phosphate
  modified_base 20: mod_base = OTHER; note = 2'-O-methylcytidine-3'-phosphate
  modified_base 21: mod_base = OTHER; note = 2'-O-methyladenosine-3'-phosphorothioate
  modified_base 22: mod_base = OTHER; note = 2'-O-methylcytidine-3'-phosphorothioate
  modified_base 23: mod_base = OTHER; note = 2'-O-methyluridine
acggccctcaatgtggatccact

SEQ ID NO: 316 - RNA, 23 nt, synthetic construct
  source 1..23: mol_type = other RNA
  modified_base 1: mod_base = OTHER; note = 2'-O-methyluridine-3'-phosphorothioate
  modified_base 2: mod_base = OTHER; note = 2'-deoxy-2'-fluoroguanosine-3'-phosphorothioate
  modified_base 3: mod_base = OTHER; note = 2'-O-methyluridine-3'-phosphate
  modified_base 4: mod_base = OTHER; note = 2'-O-methyladenosine-3'-phosphate
  modified_base 5: mod_base = OTHER; note = 2'-O-methylguanosine-3'-phosphate
  modified_base 6: mod_base = OTHER; note = 2'-O-methylcytidine-3'-phosphate
  modified_base 7: mod_base = OTHER; note = Adenosine-glycol nucleic acid (GNA), S-isomer
  modified_base 8: mod_base = OTHER; note = 2'-O-methylguanosine-3'-phosphate
  modified_base 9: mod_base = OTHER; note = 2'-O-methyladenosine-3'-phosphate
  modified_base 10: mod_base = OTHER; note = 2'-O-methylcytidine-3'-phosphate
  modified_base 11: mod_base = OTHER; note = 2'-O-methyladenosine-3'-phosphate
  modified_base 12: mod_base = OTHER; note = 2'-O-methylcytidine-3'-phosphate
  modified_base 13: mod_base = OTHER; note = 2'-O-methyladenosine-3'-phosphate
  modified_base 14: mod_base = OTHER; note = 2'-deoxy-2'-fluorouridine-3'-phosphate
  modified_base 15: mod_base = OTHER; note = 2'-O-methylcytidine-3'-phosphate
  modified_base 16: mod_base = OTHER; note = 2'-deoxy-2'-fluorouridine-3'-phosphate
  modified_base 17: mod_base = OTHER; note = 2'-O-methylguanosine-3'-phosphate
  modified_base 18: mod_base = OTHER; note = 2'-O-methylguanosine-3'-phosphate
  modified_base 19: mod_base = OTHER; note = 2'-O-methylcytidine-3'-phosphate
  modified_base 20: mod_base = OTHER; note = 2'-O-methyladenosine-3'-phosphate
  modified_base 21: mod_base = OTHER; note = 2'-O-methylguanosine-3'-phosphorothioate
  modified_base 22: mod_base = OTHER; note = 2'-O-methylguanosine-3'-phosphorothioate
  modified_base 23: mod_base = OTHER; note = 2'-O-methylcytidine
tgtagcagacacatctggcaggc

SEQ ID NO: 317 - RNA, 23 nt, synthetic construct
  source 1..23: mol_type = other RNA
ttttctctttgcattctcgagat

SEQ ID NO: 318 - RNA, 23 nt, synthetic construct
  source 1..23: mol_type = other RNA
gccctgcgttgtgcagactctat

SEQ ID NO: 319 - RNA, 23 nt, synthetic construct
  source 1..23: mol_type = other RNA
cgagatcgcttagccgcgcttta

SEQ ID NO: 320 - RNA, 23 nt, synthetic construct
  source 1..23: mol_type = other RNA
attttctctttgcattctcgaga

SEQ ID NO: 321 - RNA, 23 nt, synthetic construct
  source 1..23: mol_type = other RNA
ctgtgagtccatctgacaagcga

SEQ ID NO: 322 - RNA, 23 nt, synthetic construct
  source 1..23: mol_type = other RNA
gtccaactcctgcaccgttctct

SEQ ID NO: 323 - RNA, 23 nt, synthetic construct
  source 1..23: mol_type = other RNA
ggcttgtatggtcgtgtgaggaa

SEQ ID NO: 324 - RNA, 23 nt, synthetic construct
  source 1..23: mol_type = other RNA
tggatccacattgagggccggaa

SEQ ID NO: 325 - RNA, 23 nt, synthetic construct
  source 1..23: mol_type = other RNA
cagctgtttggctacggagacgt

SEQ ID NO: 326 - RNA, 23 nt, synthetic construct
  source 1..23: mol_type = other RNA
atctgccatttaattagctgcat

SEQ ID NO: 327 - RNA, 23 nt, synthetic construct
  source 1..23: mol_type = other RNA
aagagaagcagatcctgtgcgtg

SEQ ID NO: 328 - RNA, 23 nt, synthetic construct
  source 1..23: mol_type = other RNA
tgtgagtccatctgacaagcgag

SEQ ID NO: 329 - RNA, 23 nt, synthetic construct
  source 1..23: mol_type = other RNA
tgcattctcgagatcgcttagcc

SEQ ID NO: 330 - RNA, 23 nt, synthetic construct
  source 1..23: mol_type = other RNA
gtgagtccatctgacaagcgagg

SEQ ID NO: 331 - RNA, 23 nt, synthetic construct
  source 1..23: mol_type = other RNA
tgaagatgctgcagcggatagac

SEQ ID NO: 332 - RNA, 23 nt, synthetic construct
  source 1..23: mol_type = other RNA
gcattctcgagatcgcttagccg

SEQ ID NO: 333 - RNA, 23 nt, synthetic construct
  source 1..23: mol_type = other RNA
aggctgagaagtgggaggcgttg

SEQ ID NO: 334 - RNA, 23 nt, synthetic construct
  source 1..23: mol_type = other RNA
agatgctgcagcggatagacgca

SEQ ID NO: 335 - RNA, 23 nt, synthetic construct
  source 1..23: mol_type = other RNA
tttctctttgcattctcgagatc

SEQ ID NO: 336 - RNA, 23 nt, synthetic construct
  source 1..23: mol_type = other RNA
ttctctttgcattctcgagatcg

SEQ ID NO: 337 - RNA, 23 nt, synthetic construct
  source 1..23: mol_type = other RNA
cttggagcccaccttggaattaa

SEQ ID NO: 338 - RNA, 23 nt, synthetic construct
  source 1..23: mol_type = other RNA
agcctggtggacaagtaccctaa

SEQ ID NO: 339 - RNA, 23 nt, synthetic construct
  source 1..23: mol_type = other RNA
attctcgagatcgcttagccgcg

SEQ ID NO: 340 - RNA, 23 nt, synthetic construct
  source 1..23: mol_type = other RNA
tgagtccatctgacaagcgagga

SEQ ID NO: 341 - RNA, 23 nt, synthetic construct
  source 1..23: mol_type = other RNA
ccagctgtttggctacggagacg

SEQ ID NO: 342 - RNA, 23 nt, synthetic construct
  source 1..23: mol_type = other RNA
aagatgctgcagcggatagacgc

SEQ ID NO: 343 - RNA, 23 nt, synthetic construct
  source 1..23: mol_type = other RNA
aaaatctgccatttaattagctg

SEQ ID NO: 344 - RNA, 23 nt, synthetic construct
  source 1..23: mol_type = other RNA
ttgcattctcgagatcgcttagc

SEQ ID NO: 345 - RNA, 23 nt, synthetic construct
  source 1..23: mol_type = other RNA
gcttgtatggtcgtgtgaggaaa

SEQ ID NO: 346 - RNA, 23 nt, synthetic construct
  source 1..23: mol_type = other RNA
ggtgaagatgctgcagcggatag

SEQ ID NO: 347 - RNA, 23 nt, synthetic construct
  source 1..23: mol_type = other RNA
gcctgcagggctttgatggcatc

SEQ ID NO: 348 - RNA, 23 nt, synthetic construct
  source 1..23: mol_type = other RNA
tttggctacggagacgtggtgtt

SEQ ID NO: 349 - RNA, 23 nt, synthetic construct
  source 1..23: mol_type = other RNA
gtgaagatgctgcagcggataga

SEQ ID NO: 350 - RNA, 23 nt, synthetic construct
  source 1..23: mol_type = other RNA
ggagctggagacaccttcaatgc

SEQ ID NO: 351 - RNA, 23 nt, synthetic construct
  source 1..23: mol_type = other RNA
gctgtttggctacggagacgtgg

SEQ ID NO: 352 - RNA, 23 nt, synthetic construct
  source 1..23: mol_type = other RNA
tttgcattctcgagatcgcttag

SEQ ID NO: 353 - RNA, 23 nt, synthetic construct
  source 1..23: mol_type = other RNA
gagatcgcttagccgcgctttaa

SEQ ID NO: 354 - RNA, 23 nt, synthetic construct
  source 1..23: mol_type = other RNA
ctgcccaccagcctgtgatttga

SEQ ID NO: 355 - RNA, 23 nt, synthetic construct
  source 1..23: mol_type = other RNA
ggagacgtggtgtttgtcagcaa

SEQ ID NO: 356 - RNA, 23 nt, synthetic construct
  source 1..23: mol_type = other RNA
gaagatgctgcagcggatagacg

SEQ ID NO: 357 - RNA, 23 nt, synthetic construct
  source 1..23: mol_type = other RNA
agagaagcagatcctgtgcgtgg

SEQ ID NO: 358 - RNA, 23 nt, synthetic construct
  source 1..23: mol_type = other RNA
gggcttgtatggtcgtgtgagga

SEQ ID NO: 359 - RNA, 23 nt, synthetic construct
  source 1..23: mol_type = other RNA
cattctcgagatcgcttagccgc

SEQ ID NO: 360 - RNA, 23 nt, synthetic construct
  source 1..23: mol_type = other RNA
tttgagaaggttgatctgaccca

SEQ ID NO: 361 - RNA, 23 nt, synthetic construct
  source 1..23: mol_type = other RNA
ctttgcattctcgagatcgctta

SEQ ID NO: 362 - RNA, 23 nt, synthetic construct
  source 1..23: mol_type = other RNA
cctgcgttgtgcagactctattc

SEQ ID NO: 363 - RNA, 23 nt, synthetic construct
  source 1..23: mol_type = other RNA
cgtccaactcctgcaccgttctc

SEQ ID NO: 364 - RNA, 23 nt, synthetic construct
  source 1..23: mol_type = other RNA
tcgagatcgcttagccgcgcttt

SEQ ID NO: 365 - RNA, 23 nt, synthetic construct
  source 1..23: mol_type = other RNA
agctgtttggctacggagacgtg

SEQ ID NO: 366 - RNA, 23 nt, synthetic construct
  source 1..23: mol_type = other RNA
gggagctggagacaccttcaatg

SEQ ID NO: 367 - RNA, 23 nt, synthetic construct
  source 1..23: mol_type = other RNA
aaggctgagaagtgggaggcgtt

SEQ ID NO: 368 - RNA, 23 nt, synthetic construct
  source 1..23: mol_type = other RNA
cggagacgtggtgtttgtcagca

SEQ ID NO: 369 - RNA, 23 nt, synthetic construct
  source 1..23: mol_type = other RNA
gaagagaagcagatcctgtgcgt

SEQ ID NO: 370 - RNA, 23 nt, synthetic construct
  source 1..23: mol_type = other RNA
cattttctctttgcattctcgag

SEQ ID NO: 371 - RNA, 23 nt, synthetic construct
  source 1..23: mol_type = other RNA
ttggagcccaccttggaattaag

SEQ ID NO: 372 - RNA, 23 nt, synthetic construct
  source 1..23: mol_type = other RNA
tctttgcattctcgagatcgctt

SEQ ID NO: 373 - RNA, 23 nt, synthetic construct
  source 1..23: mol_type = other RNA
tgctccactcggatgctttcccg

SEQ ID NO: 374 - RNA, 23 nt, synthetic construct
  source 1..23: mol_type = other RNA
ggggcttgtatggtcgtgtgagg

SEQ ID NO: 375 - RNA, 23 nt, synthetic construct
  source 1..23: mol_type = other RNA
ttggctacggagacgtggtgttt

SEQ ID NO: 376 - RNA, 23 nt, synthetic construct
  source 1..23: mol_type = other RNA
ctttgagaaggttgatctgaccc

SEQ ID NO: 377 - RNA, 23 nt, synthetic construct
  source 1..23: mol_type = other RNA
tggagcccaccttggaattaagg

SEQ ID NO: 378 - RNA, 23 nt, synthetic construct
  source 1..23: mol_type = other RNA
tgcttgtctgtgcctgggctgag

SEQ ID NO: 379 - RNA, 23 nt, synthetic construct
  source 1..23: mol_type = other RNA
tctctttgcattctcgagatcgc

SEQ ID NO: 380 - RNA, 23 nt, synthetic construct
  source 1..23: mol_type = other RNA
gtgcaggaagcactgagattcgg

SEQ ID NO: 381 - RNA, 23 nt, synthetic construct
  source 1..23: mol_type = other RNA
ttctcgagatcgcttagccgcgc

SEQ ID NO: 382 - RNA, 23 nt, synthetic construct
  source 1..23: mol_type = other RNA
ctggagacaccttcaatgcctcc

SEQ ID NO: 383 - RNA, 23 nt, synthetic construct
  source 1..23: mol_type = other RNA
ctctttgcattctcgagatcgct

SEQ ID NO: 384 - RNA, 23 nt, synthetic construct
  source 1..23: mol_type = other RNA
agtggatccacattgagggccgg

SEQ ID NO: 385 - RNA, 23 nt, synthetic construct
  source 1..23: mol_type = other RNA
gcctgccagatgtgtctgctaca

SEQ ID NO: 386 - RNA, 21 nt, synthetic construct
  source 1..21: mol_type = other RNA
  modified_base 9: mod_base = OTHER; note = 5'-methyluridine-3'-phosphate
agatcgcttagccgcgcttta

SEQ ID NO: 387 - RNA, 21 nt, synthetic construct
  source 1..21: mol_type = other RNA
  modified_base 9: mod_base = OTHER; note = 5'-methyluridine-3'-phosphate
tttctctttgcattctcgaga

SEQ ID NO: 388 - RNA, 21 nt, synthetic construct
  source 1..21: mol_type = other RNA
  modified_base 9: mod_base = OTHER; note = 5'-methyluridine-3'-phosphate
ccaactcctgcaccgttctct

SEQ ID NO: 389 - RNA, 21 nt, synthetic construct
  source 1..21: mol_type = other RNA
  modified_base 9: mod_base = OTHER; note = 5'-methyluridine-3'-phosphate
gatccacattgagggccggaa

SEQ ID NO: 390 - RNA, 21 nt, synthetic construct
  source 1..21: mol_type = other RNA
  modified_base 11: mod_base = OTHER; note = 5'-methyluridine-3'-phosphate
gctgtttggctacggagacgt

SEQ ID NO: 391 - RNA, 21 nt, synthetic construct
  source 1..21: mol_type = other RNA
  modified_base 9: mod_base = OTHER; note = 5'-methyluridine-3'-phosphate
ctgccatttaattagctgcat

SEQ ID NO: 392 - RNA, 21 nt, synthetic construct
  source 1..21: mol_type = other RNA
  modified_base 11: mod_base = OTHER; note = 5'-methyluridine-3'-phosphate
gagaagcagatcctgtgcgtt

SEQ ID NO: 393 - RNA, 21 nt, synthetic construct
  source 1..21: mol_type = other RNA
  modified_base 9: mod_base = OTHER; note = 5'-methyluridine-3'-phosphate
  modified_base 11: mod_base = OTHER; note = 5'-methyluridine-3'-phosphate
tgagtccatctgacaagcgat

SEQ ID NO: 394 - RNA, 21 nt, synthetic construct
  source 1..21: mol_type = other RNA
  modified_base 11: mod_base = OTHER; note = 5'-methyluridine-3'-phosphate
attctcgagatcgcttagcct

SEQ ID NO: 395 - RNA, 21 nt, synthetic construct
  source 1..21: mol_type = other RNA
  modified_base 11: mod_base = OTHER; note = 5'-methyluridine-3'-phosphate
tctctttgcattctcgagatt

SEQ ID NO: 396 - RNA, 21 nt, synthetic construct
  source 1..21: mol_type = other RNA
  modified_base 11: mod_base = OTHER; note = 5'-methyluridine-3'-phosphate
ctctttgcattctcgagatct

SEQ ID NO: 397 - RNA, 21 nt, synthetic construct
  source 1..21: mol_type = other RNA
cccagttcaagtggatccaca

SEQ ID NO: 398 - RNA, 21 nt, synthetic construct
  source 1..21: mol_type = other RNA
  modified_base 9: mod_base = OTHER; note = 5'-methyluridine-3'-phosphate
tctcgagatcgcttagccgct

SEQ ID NO: 399 - RNA, 21 nt, synthetic construct
  source 1..21: mol_type = other RNA
  modified_base 9: mod_base = OTHER; note = 5'-methyluridine-3'-phosphate
agtccatctgacaagcgagga

SEQ ID NO: 400 - RNA, 21 nt, synthetic construct
  source 1..21: mol_type = other RNA
  modified_base 11: mod_base = OTHER; note = 5'-methyluridine-3'-phosphate
aatctgccatttaattagctt

SEQ ID NO: 401 - RNA, 21 nt, synthetic construct
  source 1..21: mol_type = other RNA
  modified_base 9: mod_base = OTHER; note = 5'-methyluridine-3'-phosphate
ttgtatggtcgtgtgaggaaa

SEQ ID NO: 402 - RNA, 21 nt, synthetic construct
  source 1..21: mol_type = other RNA
  modified_base 11: mod_base = OTHER; note = 5'-methyluridine-3'-phosphate
ctgcagggctttgatggcatt

SEQ ID NO: 403 - RNA, 21 nt, synthetic construct
  source 1..21: mol_type = other RNA
  modified_base 9: mod_base = OTHER; note = 5'-methyluridine-3'-phosphate
gaagatgctgcagcggataga

SEQ ID NO: 404 - RNA, 21 nt, synthetic construct
  source 1..21: mol_type = other RNA
  modified_base 9: mod_base = OTHER; note = 5'-methyluridine-3'-phosphate
tgtttggctacggagacgtgt

SEQ ID NO: 405 - RNA, 21 nt, synthetic construct
  source 1..21: mol_type = other RNA
  modified_base 9: mod_base = OTHER; note = 5'-methyluridine-3'-phosphate
  modified_base 11: mod_base = OTHER; note = 5'-methyluridine-3'-phosphate
agacgtggtgtttgtcagcaa

SEQ ID NO: 406 - RNA, 21 nt, synthetic construct
  source 1..21: mol_type = other RNA
  modified_base 11: mod_base = OTHER; note = 5'-methyluridine-3'-phosphate
gcttgtatggtcgtgtgagga

SEQ ID NO: 407 - RNA, 21 nt, synthetic construct
  source 1..21: mol_type = other RNA
  modified_base 9: mod_base = OTHER; note = 5'-methyluridine-3'-phosphate
tgagaaggttgatctgaccca

SEQ ID NO: 408 - RNA, 21 nt, synthetic construct
  source 1..21: mol_type = other RNA
  modified_base 9: mod_base = OTHER; note = 5'-methyluridine-3'-phosphate
ttgcattctcgagatcgctta

SEQ ID NO: 409 - RNA, 21 nt, synthetic construct
  source 1..21: mol_type = other RNA
  modified_base 9: mod_base = OTHER; note = 5'-methyluridine-3'-phosphate
gagatcgcttagccgcgcttt

SEQ ID NO: 410 - RNA, 21 nt, synthetic construct
  source 1..21: mol_type = other RNA
  modified_base 11: mod_base = OTHER; note = 5'-methyluridine-3'-phosphate
ggctgagaagtgggaggcgtt

SEQ ID NO: 411 - RNA, 21 nt, synthetic construct
  source 1..21: mol_type = other RNA
  modified_base 9: mod_base = OTHER; note = 5'-methyluridine-3'-phosphate
ttttctctttgcattctcgat

SEQ ID NO: 412 - RNA, 21 nt, synthetic construct
  source 1..21: mol_type = other RNA
  modified_base 11: mod_base = OTHER; note = 5'-methyluridine-3'-phosphate
ggagcccaccttggaattaat

SEQ ID NO: 413 - RNA, 21 nt, synthetic construct
  source 1..21: mol_type = other RNA
  modified_base 9: mod_base = OTHER; note = 5'-methyluridine-3'-phosphate
ggcttgtatggtcgtgtgagt

SEQ ID NO: 414 - RNA, 21 nt, synthetic construct
  source 1..21: mol_type = other RNA
  modified_base 11: mod_base = OTHER; note = 5'-methyluridine-3'-phosphate
ttgagaaggttgatctgacct

SEQ ID NO: 415 - RNA, 21 nt, synthetic construct
  source 1..21: mol_type = other RNA
  modified_base 11: mod_base = OTHER; note = 5'-methyluridine-3'-phosphate
gagcccaccttggaattaagt

SEQ ID NO: 416 - RNA, 21 nt, synthetic construct
  source 1..21: mol_type = other RNA
  modified_base 9: mod_base = OTHER; note = 5'-methyluridine-3'-phosphate
cttgtctgtgcctgggctgat

SEQ ID NO: 417 - RNA, 21 nt, synthetic construct
  source 1..21: mol_type = other RNA
  modified_base 9: mod_base = OTHER; note = 5'-methyluridine-3'-phosphate
tctttgcattctcgagatcgt

SEQ ID NO: 418 - RNA, 21 nt, synthetic construct
  source 1..21: mol_type = other RNA
  modified_base 11: mod_base = OTHER; note = 5'-methyluridine-3'-phosphate
ggagacaccttcaatgcctct

SEQ ID NO: 419 - RNA, 21 nt, synthetic construct
  source 1..21: mol_type = other RNA
  modified_base 9: mod_base = OTHER; note = 5'-methyluridine-3'-phosphate
  modified_base 11: mod_base = OTHER; note = 5'-methyluridine-3'-phosphate
ctttgcattctcgagatcgct

SEQ ID NO: 420 - RNA, 21 nt, synthetic construct
  source 1..21: mol_type = other RNA
  modified_base 11: mod_base = OTHER; note = 5'-methyluridine-3'-phosphate
tggatccacattgagggccgt

SEQ ID NO: 421 - RNA, 21 nt, synthetic construct
  source 1..21: mol_type = other RNA
  modified_base 9: mod_base = OTHER; note = 5'-methyluridine-3'-phosphate
  modified_base 11: mod_base = OTHER; note = 5'-methyluridine-3'-phosphate
ctgccagatgtgtctgctaca

SEQ ID NO: 422 - RNA, 23 nt, synthetic construct
  source 1..23: mol_type = other RNA
  modified_base 2: mod_base = OTHER; note = 5'-methyluridine-3'-phosphate
atctcgagaatgcaaagagaaaa

SEQ ID NO: 423 - RNA, 23 nt, synthetic construct
  source 1..23: mol_type = other RNA
  modified_base 2: mod_base = OTHER; note = 5'-methyluridine-3'-phosphate
  modified_base 7: mod_base = OTHER; note = 5'-methyluridine-3'-phosphate
atagagtctgcacaacgcagggc

SEQ ID NO: 424 - RNA, 23 nt, synthetic construct
  source 1..23: mol_type = other RNA
  modified_base 12: mod_base = OTHER; note = 5'-methyluridine-3'-phosphate
taaagcgcggctaagcgatctcg

SEQ ID NO: 425 - RNA, 23 nt, synthetic construct
  source 1..23: mol_type = other RNA
  modified_base 5: mod_base = OTHER; note = 5'-methyluridine-3'-phosphate
tcgcttgtcagatggactcacag

SEQ ID NO: 426 - RNA, 23 nt, synthetic construct
  source 1..23: mol_type = other RNA
  modified_base 2: mod_base = OTHER; note = 5'-methyluridine-3'-phosphate
  modified_base 5: mod_base = OTHER; note = 5'-methyluridine-3'-phosphate
ttcctcacacgaccatacaagcc

SEQ ID NO: 427 - RNA, 23 nt, synthetic construct
  source 1..23: mol_type = other RNA
  modified_base 2: mod_base = OTHER; note = 5'-methyluridine-3'-phosphate
  modified_base 14: mod_base = OTHER; note = 5'-methyluridine-3'-phosphate
ttccggccctcaatgtggatcca

SEQ ID NO: 428 - RNA, 23 nt, synthetic construct
  source 1..23: mol_type = other RNA
  modified_base 2: mod_base = OTHER; note = 5'-methyluridine-3'-phosphate
  modified_base 12: mod_base = OTHER; note = 5'-methyluridine-3'-phosphate
atgcagctaattaaatggcagat

SEQ ID NO: 429 - RNA, 23 nt, synthetic construct
  source 1..23: mol_type = other RNA
  modified_base 12: mod_base = OTHER; note = 5'-methyluridine-3'-phosphate
  modified_base 14: mod_base = OTHER; note = 5'-methyluridine-3'-phosphate
aacgcacaggatctgcttctctt

SEQ ID NO: 430 - RNA, 23 nt, synthetic construct
  source 1..23: mol_type = other RNA
  modified_base 2: mod_base = OTHER; note = 5'-methyluridine-3'-phosphate
  modified_base 7: mod_base = OTHER; note = 5'-methyluridine-3'-phosphate
  modified_base 14: mod_base = OTHER; note = 5'-methyluridine-3'-phosphate
atcgcttgtcagatggactcaca

SEQ ID NO: 431 - RNA, 23 nt, synthetic construct
  source 1..23: mol_type = other RNA
  modified_base 2: mod_base = OTHER; note = 5'-methyluridine-3'-phosphate
atctatccgctgcagcatcttca

SEQ ID NO: 432 - RNA, 23 nt, synthetic construct
  source 1..23: mol_type = other RNA
  modified_base 5: mod_base = OTHER; note = 5'-methyluridine-3'-phosphate
  modified_base 12: mod_base = OTHER; note = 5'-methyluridine-3'-phosphate
  modified_base 14: mod_base = OTHER; note = 5'-methyluridine-3'-phosphate
aggctaagcgatctcgagaatgc

SEQ ID NO: 433 - RNA, 23 nt, synthetic construct
  source 1..23: mol_type = other RNA
  modified_base 14: mod_base = OTHER; note = 5'-methyluridine-3'-phosphate
aaacgcctcccacttctcagcct

SEQ ID NO: 434 - RNA, 23 nt, synthetic construct
  source 1..23: mol_type = other RNA
  modified_base 5: mod_base = OTHER; note = 5'-methyluridine-3'-phosphate
  modified_base 7: mod_base = OTHER; note = 5'-methyluridine-3'-phosphate
  modified_base 14: mod_base = OTHER; note = 5'-methyluridine-3'-phosphate
tgcgtctatccgctgcagcatct

SEQ ID NO: 435 - RNA, 23 nt, synthetic construct
  source 1..23: mol_type = other RNA
  modified_base 5: mod_base = OTHER; note = 5'-methyluridine-3'-phosphate
  modified_base 12: mod_base = OTHER; note = 5'-methyluridine-3'-phosphate
aatctcgagaatgcaaagagaaa

SEQ ID NO: 436 - RNA, 23 nt, synthetic construct
  source 1..23: mol_type = other RNA
  modified_base 2: mod_base = OTHER; note = 5'-methyluridine-3'-phosphate
  modified_base 5: mod_base = OTHER; note = 5'-methyluridine-3'-phosphate
ttaattccaaggtgggctccaag

SEQ ID NO: 437 - RNA, 23 nt, synthetic construct
  source 1..23: mol_type = other RNA
  modified_base 7: mod_base = OTHER; note = 5'-methyluridine-3'-phosphate
  modified_base 12: mod_base = OTHER; note = 5'-methyluridine-3'-phosphate
tgtggatccacttgaactgggtc

SEQ ID NO: 438 - RNA, 23 nt, synthetic construct
  source 1..23: mol_type = other RNA
  modified_base 2: mod_base = OTHER; note = 5'-methyluridine-3'-phosphate
  modified_base 7: mod_base = OTHER; note = 5'-methyluridine-3'-phosphate
ttagggtacttgtccaccaggct

SEQ ID NO: 439 - RNA, 23 nt, synthetic construct
  source 1..23: mol_type = other RNA
  modified_base 7: mod_base = OTHER; note = 5'-methyluridine-3'-phosphate
  modified_base 14: mod_base = OTHER; note = 5'-methyluridine-3'-phosphate
agcggctaagcgatctcgagaat

SEQ ID NO: 440 - RNA, 23 nt, synthetic construct
  source 1..23: mol_type = other RNA
  modified_base 5: mod_base = OTHER; note = 5'-methyluridine-3'-phosphate
agtctccgtagccaaacagctgg

SEQ ID NO: 441 - RNA, 23 nt, synthetic construct
  source 1..23: mol_type = other RNA
  modified_base 5: mod_base = OTHER; note = 5'-methyluridine-3'-phosphate
aagctaattaaatggcagatttt

SEQ ID NO: 442 - RNA, 23 nt, synthetic construct
  source 1..23: mol_type = other RNA
  modified_base 12: mod_base = OTHER; note = 5'-methyluridine-3'-phosphate
actaagcgatctcgagaatgcaa

SEQ ID NO: 443 - RNA, 23 nt, synthetic construct
  source 1..23: mol_type = other RNA
  modified_base 2: mod_base = OTHER; note = 5'-methyluridine-3'-phosphate
tttcctcacacgaccatacaagc

SEQ ID NO: 444 - RNA, 23 nt, synthetic construct
  source 1..23: mol_type = other RNA
  modified_base 2: mod_base = OTHER; note = 5'-methyluridine-3'-phosphate
atatccgctgcagcatcttcacc

SEQ ID NO: 445 - RNA, 23 nt, synthetic construct
  source 1..23: mol_type = other RNA
  modified_base 12: mod_base = OTHER; note = 5'-methyluridine-3'-phosphate
aacaccacgtctccgtagccaaa

SEQ ID NO: 446 - RNA, 23 nt, synthetic construct
  source 1..23: mol_type = other RNA
  modified_base 5: mod_base = OTHER; note = 5'-methyluridine-3'-phosphate
tctatccgctgcagcatcttcac

SEQ ID NO: 447 - RNA, 23 nt, synthetic construct
  source 1..23: mol_type = other RNA
  modified_base 5: mod_base = OTHER; note = 5'-methyluridine-3'-phosphate
acattgaaggtgtctccagctcc

SEQ ID NO: 448 - RNA, 23 nt, synthetic construct
  source 1..23: mol_type = other RNA
  modified_base 12: mod_base = OTHER; note = 5'-methyluridine-3'-phosphate
acacgtctccgtagccaaacagc

SEQ ID NO: 449 - RNA, 23 nt, synthetic construct
  source 1..23: mol_type = other RNA
  modified_base 2: mod_base = OTHER; note = 5'-methyluridine-3'-phosphate
ataagcgatctcgagaatgcaaa

SEQ ID NO: 450 - RNA, 23 nt, synthetic construct
  source 1..23: mol_type = other RNA
  modified_base 2: mod_base = OTHER; note = 5'-methyluridine-3'-phosphate
ttaaagcgcggctaagcgatctc

SEQ ID NO: 451 - RNA, 23 nt, synthetic construct
  source 1..23: mol_type = other RNA
  modified_base 14: mod_base = OTHER; note = 5'-methyluridine-3'-phosphate
tcaaatcacaggctggtgggcag

SEQ ID NO: 452 - RNA, 23 nt, synthetic construct
  source 1..23: mol_type = other RNA
  modified_base 2: mod_base = OTHER; note = 5'-methyluridine-3'-phosphate
  modified_base 5: mod_base = OTHER; note = 5'-methyluridine-3'-phosphate
ttgctgacaaacaccacgtctcc

SEQ ID NO: 453 - RNA, 23 nt, synthetic construct
  source 1..23: mol_type = other RNA
  modified_base 5: mod_base = OTHER; note = 5'-methyluridine-3'-phosphate
  modified_base 7: mod_base = OTHER; note = 5'-methyluridine-3'-phosphate
  modified_base 12: mod_base = OTHER; note = 5'-methyluridine-3'-phosphate
agtctatccgctgcagcatcttc

SEQ ID NO: 454 - RNA, 23 nt, synthetic construct
  source 1..23: mol_type = other RNA
  modified_base 5: mod_base = OTHER; note = 5'-methyluridine-3'-phosphate
tgggtcagatcaaccttctcaaa

SEQ ID NO: 455 - RNA, 23 nt, synthetic construct
  source 1..23: mol_type = other RNA
  modified_base 5: mod_base = OTHER; note = 5'-methyluridine-3'-phosphate
  modified_base 7: mod_base = OTHER; note = 5'-methyluridine-3'-phosphate
aacgtctccgtagccaaacagct

SEQ ID NO: 456 - RNA, 23 nt, synthetic construct
  source 1..23: mol_type = other RNA
  modified_base 12: mod_base = OTHER; note = 5'-methyluridine-3'-phosphate
  modified_base 14: mod_base = OTHER; note = 5'-methyluridine-3'-phosphate
aattgaaggtgtctccagctccc

SEQ ID NO: 457 - RNA, 23 nt, synthetic construct
  source 1..23: mol_type = other RNA
  modified_base 7: mod_base = OTHER; note = 5'-methyluridine-3'-phosphate
  modified_base 14: mod_base = OTHER; note = 5'-methyluridine-3'-phosphate
aacgcctcccacttctcagcctt

SEQ ID NO: 458 - RNA, 23 nt, synthetic construct
  source 1..23: mol_type = other RNA
  modified_base 2: mod_base = OTHER; note = 5'-methyluridine-3'-phosphate
atcgagaatgcaaagagaaaatg

SEQ ID NO: 459 - RNA, 23 nt, synthetic construct
  source 1..23: mol_type = other RNA
  modified_base 2: mod_base = OTHER; note = 5'-methyluridine-3'-phosphate
  modified_base 7: mod_base = OTHER; note = 5'-methyluridine-3'-phosphate
  modified_base 14: mod_base = OTHER; note = 5'-methyluridine-3'-phosphate
attaattccaaggtgggctccaa

SEQ ID NO: 460 - RNA, 23 nt, synthetic construct
  source 1..23: mol_type = other RNA
  modified_base 14: mod_base = OTHER; note = 5'-methyluridine-3'-phosphate
actcacacgaccatacaagcccc

SEQ ID NO: 461 - RNA, 23 nt, synthetic construct
  source 1..23: mol_type = other RNA
  modified_base 2: mod_base = OTHER; note = 5'-methyluridine-3'-phosphate
atcagcccaggcacagacaagca

SEQ ID NO: 462 - RNA, 23 nt, synthetic construct
  source 1..23: mol_type = other RNA
  modified_base 5: mod_base = OTHER; note = 5'-methyluridine-3'-phosphate
  modified_base 7: mod_base = OTHER; note = 5'-methyluridine-3'-phosphate
  modified_base 14: mod_base = OTHER; note = 5'-methyluridine-3'-phosphate
acgatctcgagaatgcaaagaga

SEQ ID NO: 463 - RNA, 23 nt, synthetic construct
  source 1..23: mol_type = other RNA
  modified_base 12: mod_base = OTHER; note = 5'-methyluridine-3'-phosphate
acgaatctcagtgcttcctgcac

SEQ ID NO: 464 - RNA, 23 nt, synthetic construct
  source 1..23: mol_type = other RNA
  modified_base 12: mod_base = OTHER; note = 5'-methyluridine-3'-phosphate
  modified_base 14: mod_base = OTHER; note = 5'-methyluridine-3'-phosphate
acggccctcaatgtggatccact

SEQ ID NO: 465 - RNA, 23 nt, synthetic construct
  source 1..23: mol_type = other RNA
  modified_base 14: mod_base = OTHER; note = 5'-methyluridine-3'-phosphate
tgtagcagacacatctggcaggc

SEQ ID NO: 466 - DNA, 21 bp, synthetic construct
  source 1..21: mol_type = other DNA
  modified_base 1: mod_base = OTHER; note = 2'-O-methyluridine-3'-phosphorothioate
  modified_base 2: mod_base = OTHER; note = 2'-O-methyluridine-3'-phosphorothioate
  modified_base 3: mod_base = OTHER; note = 2'-O-methylcytidine-3'-phosphate
  modified_base 4: mod_base = OTHER; note = 2'-O-methyluridine-3'-phosphate
  modified_base 5: mod_base = OTHER; note = 2'-O-methylcytidine-3'-phosphate
  modified_base 6: mod_base = OTHER; note = 2'-O-methyluridine-3'-phosphate
  modified_base 7: mod_base = OTHER; note = 2'-O-methyluridine-3'-phosphate
  modified_base 8: mod_base = OTHER; note = 2'-O-methyluridine-3'-phosphate
  modified_base 10: mod_base = OTHER; note = 2'-O-methylcytidine-3'-phosphate
  modified_base 12: mod_base = OTHER; note = 2'-O-methyluridine-3'-phosphate
  modified_base 13: mod_base = OTHER; note = 2'-O-methyluridine-3'-phosphate
  modified_base 14: mod_base = OTHER; note = 2'-O-methylcytidine-3'-phosphate
  modified_base 15: mod_base = OTHER; note = 2'-O-methyluridine-3'-phosphate
  modified_base 16: mod_base = OTHER; note = 2'-O-methylcytidine-3'-phosphate
  modified_base 17: mod_base = OTHER; note = 2'-O-methylguanosine-3'-phosphate
  modified_base 18: mod_base = OTHER; note = 2'-O-methyladenosine-3'-phosphate
  modified_base 19: mod_base = OTHER; note = 2'-O-methylguanosine-3'-phosphate
  modified_base 20: mod_base = OTHER; note = 2'-O-methyladenosine-3'-phosphate
  modified_base 21: mod_base = OTHER; note = 2'-O-methyluridine-3'-phosphate ((2S,4R)-1-[29-[[2-(acetylamino)-2-deoxy-beta-D-galactopyra nosyl]oxy]-14,14-bis[[3-[[3-[[5-[[2-(acetylamino)-2-deoxy-b eta-D-galactopyranosyl]oxy]-1-oxopentyl]amino]propyl]amino] -3-oxopropoxy]methyl]-1,12,19,25-tetraoxo-16-oxa-13,20,24-t riazanonacos-1-yl]-4-hydroxy-2-pyrrolidinyl)methyl ester
  misc_feature 1..8: note = RNA
  misc_feature 10: note = RNA
  misc_feature 12..21: note = RNA
  misc_feature 9: note = DNA
  misc_feature 11: note = DNA
ttctctttgcattctcgagat

SEQ ID NO: 467 - DNA, 21 bp, synthetic construct
  source 1..21: mol_type = other DNA
  modified_base 1: mod_base = OTHER; note = 2'-O-methylcytidine-3'-phosphorothioate
  modified_base 2: mod_base = OTHER; note = 2'-O-methylcytidine-3'-phosphorothioate
  modified_base 3: mod_base = OTHER; note = 2'-O-methyluridine-3'-phosphate
  modified_base 4: mod_base = OTHER; note = 2'-O-methylguanosine-3'-phosphate
  modified_base 5: mod_base = OTHER; note = 2'-O-methylcytidine-3'-phosphate
  modified_base 6: mod_base = OTHER; note = 2'-O-methylguanosine-3'-phosphate
  modified_base 7: mod_base = OTHER; note = 2'-O-methyluridine-3'-phosphate
  modified_base 8: mod_base = OTHER; note = 2'-O-methyluridine-3'-phosphate
  modified_base 10: mod_base = OTHER; note = 2'-O-methyluridine-3'-phosphate
  modified_base 12: mod_base = OTHER; note = 2'-O-methylcytidine-3'-phosphate
  modified_base 13: mod_base = OTHER; note = 2'-O-methyladenosine-3'-phosphate
  modified_base 14: mod_base = OTHER; note = 2'-O-methylguanosine-3'-phosphate
  modified_base 15: mod_base = OTHER; note = 2'-O-methyladenosine-3'-phosphate
  modified_base 16: mod_base = OTHER; note = 2'-O-methylcytidine-3'-phosphate
  modified_base 17: mod_base = OTHER; note = 2'-O-methyluridine-3'-phosphate
  modified_base 18: mod_base = OTHER; note = 2'-O-methylcytidine-3'-phosphate
  modified_base 19: mod_base = OTHER; note = 2'-O-methyluridine-3'-phosphate
  modified_base 20: mod_base = OTHER; note = 2'-O-methyladenosine-3'-phosphate
  modified_base 21: mod_base = OTHER; note = 2'-O-methyluridine-3'-phosphate ((2S,4R)-1-[29-[[2-(acetylamino)-2-deoxy-beta-D-galactopyra nosyl]oxy]-14,14-bis[[3-[[3-[[5-[[2-(acetylamino)-2-deoxy-b eta-D-galactopyranosyl]oxy]-1-oxopentyl]amino]propyl]amino] -3-oxopropoxy]methyl]-1,12,19,25-tetraoxo-16-oxa-13,20,24-t riazanonacos-1-yl]-4-hydroxy-2-pyrrolidinyl)methyl ester
  misc_feature 1..8: note = RNA
  misc_feature 10: note = RNA
  misc_feature 12..21: note = RNA
  misc_feature 9: note = DNA
  misc_feature 11: note = DNA
cctgcgttgtgcagactctat

SEQ ID NO: 468 - DNA, 21 bp, synthetic construct
  source 1..21: mol_type = other DNA
  modified_base 1: mod_base = OTHER; note = 2'-O-methyladenosine-3'-phosphorothioate
  modified_base 2: mod_base = OTHER; note = 2'-O-methylguanosine-3'-phosphorothioate
  modified_base 3: mod_base = OTHER; note = 2'-O-methyladenosine-3'-phosphate
  modified_base 4: mod_base = OTHER; note = 2'-O-methyluridine-3'-phosphate
  modified_base 5: mod_base = OTHER; note = 2'-O-methylcytidine-3'-phosphate
  modified_base 6: mod_base = OTHER; note = 2'-O-methylguanosine-3'-phosphate
  modified_base 7: mod_base = OTHER; note = 2'-O-methylcytidine-3'-phosphate
  modified_base 8: mod_base = OTHER; note = 2'-O-methyluridine-3'-phosphate
  modified_base 10: mod_base = OTHER; note = 2'-O-methyladenosine-3'-phosphate
  modified_base 12: mod_base = OTHER; note = 2'-O-methylcytidine-3'-phosphate
  modified_base 13: mod_base = OTHER; note = 2'-O-methylcytidine-3'-phosphate
  modified_base 14: mod_base = OTHER; note = 2'-O-methylguanosine-3'-phosphate
  modified_base 15: mod_base = OTHER; note = 2'-O-methylcytidine-3'-phosphate
  modified_base 16: mod_base = OTHER; note = 2'-O-methylguanosine-3'-phosphate
  modified_base 17: mod_base = OTHER; note = 2'-O-methylcytidine-3'-phosphate
  modified_base 18: mod_base = OTHER; note = 2'-O-methyluridine-3'-phosphate
  modified_base 19: mod_base = OTHER; note = 2'-O-methyluridine-3'-phosphate
  modified_base 20: mod_base = OTHER; note = 2'-O-methyluridine-3'-phosphate
  modified_base 21: mod_base = OTHER; note = 2'-O-methyladenosine-3'-phosphate ((2S,4R)-1-[29-[[2-(acetylamino)-2-deoxy-beta-D-galactopyra nosyl]oxy]-14,14-bis[[3-[[3-[[5-[[2-(acetylamino)-2-deoxy-b eta-D-galactopyranosyl]oxy]-1-oxopentyl]amino]propyl]amino] -3-oxopropoxy]methyl]-1,12,19,25-tetraoxo-16-oxa-13,20,24-t riazanonacos-1-yl]-4-hydroxy-2-pyrrolidinyl)methyl ester
  misc_feature 1..8: note = RNA
  misc_feature 10: note = RNA
  misc_feature 12..21: note = RNA
  misc_feature 9: note = DNA
  misc_feature 11: note = DNA
agatcgcttagccgcgcttta

SEQ ID NO: 469 - DNA, 21 bp, synthetic construct
  source 1..21: mol_type = other DNA
  modified_base 1: mod_base = OTHER; note = 2'-O-methyluridine-3'-phosphorothioate
  modified_base 2: mod_base = OTHER; note = 2'-O-methyluridine-3'-phosphorothioate
  modified_base 3: mod_base = OTHER; note = 2'-O-methyluridine-3'-phosphate
  modified_base 4: mod_base = OTHER; note = 2'-O-methylcytidine-3'-phosphate
  modified_base 5: mod_base = OTHER; note = 2'-O-methyluridine-3'-phosphate
  modified_base 6: mod_base = OTHER; note = 2'-O-methylcytidine-3'-phosphate
  modified_base 7: mod_base = OTHER; note = 2'-O-methyluridine-3'-phosphate
  modified_base 8: mod_base = OTHER; note = 2'-O-methyluridine-3'-phosphate
  modified_base 10: mod_base = OTHER; note = 2'-O-methylguanosine-3'-phosphate
  modified_base 12: mod_base = OTHER; note = 2'-O-methyladenosine-3'-phosphate
  modified_base 13: mod_base = OTHER; note = 2'-O-methyluridine-3'-phosphate
  modified_base 14: mod_base = OTHER; note = 2'-O-methyluridine-3'-phosphate
  modified_base 15: mod_base = OTHER; note = 2'-O-methylcytidine-3'-phosphate
  modified_base 16: mod_base = OTHER; note = 2'-O-methyluridine-3'-phosphate
  modified_base 17: mod_base = OTHER; note = 2'-O-methylcytidine-3'-phosphate
  modified_base 18: mod_base = OTHER; note = 2'-O-methylguanosine-3'-phosphate
  modified_base 19: mod_base = OTHER; note = 2'-O-methyladenosine-3'-phosphate
  modified_base 20: mod_base = OTHER; note = 2'-O-methylguanosine-3'-phosphate
  modified_base 21: mod_base = OTHER; note = 2'-O-methyladenosine-3'-phosphate ((2S,4R)-1-[29-[[2-(acetylamino)-2-deoxy-beta-D-galactopyra nosyl]oxy]-14,14-bis[[3-[[3-[[5-[[2-(acetylamino)-2-deoxy-b eta-D-galactopyranosyl]oxy]-1-oxopentyl]amino]propyl]amino] -3-oxopropoxy]methyl]-1,12,19,25-tetraoxo-16-oxa-13,20,24-t riazanonacos-1-yl]-4-hydroxy-2-pyrrolidinyl)methyl ester
  misc_feature 1..8: note = RNA
  misc_feature 10: note = RNA
  misc_feature 12..21: note = RNA
  misc_feature 9: note = DNA
  misc_feature 11: note = DNA
tttctctttgcattctcgaga

SEQ ID NO: 470 - DNA, 21 bp, synthetic construct
  source 1..21: mol_type = other DNA
  modified_base 1: mod_base = OTHER; note = 2'-O-methylguanosine-3'-phosphorothioate
  modified_base 2: mod_base = OTHER; note = 2'-O-methyluridine-3'-phosphorothioate
  modified_base 3: mod_base = OTHER; note = 2'-O-methylguanosine-3'-phosphate
  modified_base 4: mod_base = OTHER; note = 2'-O-methyladenosine-3'-phosphate
  modified_base 5: mod_base = OTHER; note = 2'-O-methylguanosine-3'-phosphate
  modified_base 6: mod_base = OTHER; note = 2'-O-methyluridine-3'-phosphate
  modified_base 7: mod_base = OTHER; note = 2'-O-methylcytidine-3'-phosphate
  modified_base 8: mod_base = OTHER; note = 2'-O-methylcytidine-3'-phosphate
  modified_base 10: mod_base = OTHER; note = 2'-O-methyluridine-3'-phosphate
  modified_base 12: mod_base = OTHER; note = 2'-O-methyluridine-3'-phosphate
  modified_base 13: mod_base = OTHER; note = 2'-O-methylguanosine-3'-phosphate
  modified_base 14: mod_base = OTHER; note = 2'-O-methyladenosine-3'-phosphate
  modified_base 15: mod_base = OTHER; note = 2'-O-methylcytidine-3'-phosphate
  modified_base 16: mod_base = OTHER; note = 2'-O-methyladenosine-3'-phosphate
  modified_base 17: mod_base = OTHER; note = 2'-O-methyladenosine-3'-phosphate
  modified_base 18: mod_base = OTHER; note = 2'-O-methylguanosine-3'-phosphate
  modified_base 19: mod_base = OTHER; note = 2'-O-methylcytidine-3'-phosphate
  modified_base 20: mod_base = OTHER; note = 2'-O-methylguanosine-3'-phosphate
  modified_base 21: mod_base = OTHER; note = 2'-O-methyladenosine-3'-phosphate ((2S,4R)-1-[29-[[2-(acetylamino)-2-deoxy-beta-D-galactopyra nosyl]oxy]-14,14-bis[[3-[[3-[[5-[[2-(acetylamino)-2-deoxy-b eta-D-galactopyranosyl]oxy]-1-oxopentyl]amino]propyl]amino] -3-oxopropoxy]methyl]-1,12,19,25-tetraoxo-16-oxa-13,20,24-t riazanonacos-1-yl]-4-hydroxy-2-pyrrolidinyl)methyl ester
  misc_feature 1..8: note = RNA
  misc_feature 10: note = RNA
  misc_feature 12..21: note = RNA
  misc_feature 9: note = DNA
  misc_feature 11: note = DNA
gtgagtccatctgacaagcga

SEQ ID NO: 471 - DNA, 21 bp, synthetic construct
  source 1..21: mol_type = other DNA
  modified_base 1: mod_base = OTHER; note = 2'-O-methylcytidine-3'-phosphorothioate
  modified_base 2: mod_base = OTHER; note = 2'-O-methylcytidine-3'-phosphorothioate
  modified_base 3: mod_base = OTHER; note = 2'-O-methyladenosine-3'-phosphate
  modified_base 4: mod_base = OTHER; note = 2'-O-methyladenosine-3'-phosphate
  modified_base 5: mod_base = OTHER; note = 2'-O-methylcytidine-3'-phosphate
  modified_base 6: mod_base = OTHER; note = 2'-O-methyluridine-3'-phosphate
  modified_base 7: mod_base = OTHER; note = 2'-O-methylcytidine-3'-phosphate
  modified_base 8: mod_base = OTHER; note = 2'-O-methylcytidine-3'-phosphate
  modified_base 10: mod_base = OTHER; note = 2'-O-methylguanosine-3'-phosphate
  modified_base 12: mod_base = OTHER; note = 2'-O-methyladenosine-3'-phosphate
  modified_base 13: mod_base = OTHER; note = 2'-O-methylcytidine-3'-phosphate
  modified_base 14: mod_base = OTHER; note = 2'-O-methylcytidine-3'-phosphate
  modified_base 15: mod_base = OTHER; note = 2'-O-methylguanosine-3'-phosphate
  modified_base 16: mod_base = OTHER; note = 2'-O-methyluridine-3'-phosphate
  modified_base 17: mod_base = OTHER; note = 2'-O-methyluridine-3'-phosphate
  modified_base 18: mod_base = OTHER; note = 2'-O-methylcytidine-3'-phosphate
  modified_base 19: mod_base = OTHER; note = 2'-O-methyluridine-3'-phosphate
  modified_base 20: mod_base = OTHER; note = 2'-O-methylcytidine-3'-phosphate
  modified_base 21: mod_base = OTHER; note = 2'-O-methyluridine-3'-phosphate ((2S,4R)-1-[29-[[2-(acetylamino)-2-deoxy-beta-D-galactopyra nosyl]oxy]-14,14-bis[[3-[[3-[[5-[[2-(acetylamino)-2-deoxy-b eta-D-galactopyranosyl]oxy]-1-oxopentyl]amino]propyl]amino] -3-oxopropoxy]methyl]-1,12,19,25-tetraoxo-16-oxa-13,20,24-t riazanonacos-1-yl]-4-hydroxy-2-pyrrolidinyl)methyl ester
  misc_feature 1..8: note = RNA
  misc_feature 10: note = RNA
  misc_feature 12..21: note = RNA
  misc_feature 9: note = DNA
  misc_feature 11: note = DNA
ccaactcctgcaccgttctct

SEQ ID NO: 472 - DNA, 21 bp, synthetic construct
  source 1..21: mol_type = other DNA
  modified_base 1: mod_base = OTHER; note = 2'-O-methylcytidine-3'-phosphorothioate
  modified_base 2: mod_base = OTHER; note = 2'-O-methyluridine-3'-phosphorothioate
  modified_base 3: mod_base = OTHER; note = 2'-O-methyluridine-3'-phosphate
  modified_base 4: mod_base = OTHER; note = 2'-O-methylguanosine-3'-phosphate
  modified_base 5: mod_base = OTHER; note = 2'-O-methyluridine-3'-phosphate
  modified_base 6: mod_base = OTHER; note = 2'-O-methyladenosine-3'-phosphate
  modified_base 7: mod_base = OTHER; note = 2'-O-methyluridine-3'-phosphate
  modified_base 8: mod_base = OTHER; note = 2'-O-methylguanosine-3'-phosphate
  modified_base 10: mod_base = OTHER; note = 2'-O-methyluridine-3'-phosphate
  modified_base 12: mod_base = OTHER; note = 2'-O-methylguanosine-3'-phosphate
  modified_base 13: mod_base = OTHER; note = 2'-O-methyluridine-3'-phosphate
  modified_base 14: mod_base = OTHER; note = 2'-O-methylguanosine-3'-phosphate
  modified_base 15: mod_base = OTHER; note = 2'-O-methyluridine-3'-phosphate
  modified_base 16: mod_base = OTHER; note = 2'-O-methylguanosine-3'-phosphate
  modified_base 17: mod_base = OTHER; note = 2'-O-methyladenosine-3'-phosphate
  modified_base 18: mod_base = OTHER; note = 2'-O-methylguanosine-3'-phosphate
  modified_base 19: mod_base = OTHER; note = 2'-O-methylguanosine-3'-phosphate
  modified_base 20: mod_base = OTHER; note = 2'-O-methyladenosine-3'-phosphate
  modified_base 21: mod_base = OTHER; note = 2'-O-methyladenosine-3'-phosphate ((2S,4R)-1-[29-[[2-(acetylamino)-2-deoxy-beta-D-galactopyra nosyl]oxy]-14,14-bis[[3-[[3-[[5-[[2-(acetylamino)-2-deoxy-b eta-D-galactopyranosyl]oxy]-1-oxopentyl]amino]propyl]amino] -3-oxopropoxy]methyl]-1,12,19,25-tetraoxo-16-oxa-13,20,24-t riazanonacos-1-yl]-4-hydroxy-2-pyrrolidinyl)methyl ester
  misc_feature 1..8: note = RNA
  misc_feature 10: note = RNA
  misc_feature 12..21: note = RNA
  misc_feature 9: note = DNA
  misc_feature 11: note = DNA
cttgtatggtcgtgtgaggaa

SEQ ID NO: 473 - DNA, 21 bp, synthetic construct
  source 1..21: mol_type = other DNA
  modified_base 1: mod_base = OTHER; note = 2'-O-methylguanosine-3'-phosphorothioate
  modified_base 2: mod_base = OTHER; note = 2'-O-methyladenosine-3'-phosphorothioate
  modified_base 3: mod_base = OTHER; note = 2'-O-methyluridine-3'-phosphate
  modified_base 4: mod_base = OTHER; note = 2'-O-methylcytidine-3'-phosphate
  modified_base 5: mod_base = OTHER; note = 2'-O-methylcytidine-3'-phosphate
  modified_base 6: mod_base = OTHER; note = 2'-O-methyladenosine-3'-phosphate
  modified_base 7: mod_base = OTHER; note = 2'-O-methylcytidine-3'-phosphate
  modified_base 8: mod_base = OTHER; note = 2'-O-methyladenosine-3'-phosphate
  modified_base 10: mod_base = OTHER; note = 2'-O-methyluridine-3'-phosphate
  modified_base 12: mod_base = OTHER; note = 2'-O-methyladenosine-3'-phosphate
  modified_base 13: mod_base = OTHER; note = 2'-O-methylguanosine-3'-phosphate
  modified_base 14: mod_base = OTHER; note = 2'-O-methylguanosine-3'-phosphate
  modified_base 15: mod_base = OTHER; note = 2'-O-methylguanosine-3'-phosphate
  modified_base 16: mod_base = OTHER; note = 2'-O-methylcytidine-3'-phosphate
  modified_base 17: mod_base = OTHER; note = 2'-O-methylcytidine-3'-phosphate
  modified_base 18: mod_base = OTHER; note = 2'-O-methylguanosine-3'-phosphate
  modified_base 19: mod_base = OTHER; note = 2'-O-methylguanosine-3'-phosphate
  modified_base 20: mod_base = OTHER; note = 2'-O-methyladenosine-3'-phosphate
  modified_base 21: mod_base = OTHER; note = 2'-O-methyladenosine-3'-phosphate ((2S,4R)-1-[29-[[2-(acetylamino)-2-deoxy-beta-D-galactopyra nosyl]oxy]-14,14-bis[[3-[[3-[[5-[[2-(acetylamino)-2-deoxy-b eta-D-galactopyranosyl]oxy]-1-oxopentyl]amino]propyl]amino] -3-oxopropoxy]methyl]-1,12,19,25-tetraoxo-16-oxa-13,20,24-t riazanonacos-1-yl]-4-hydroxy-2-pyrrolidinyl)methyl ester
  misc_feature 1..8: note = RNA
  misc_feature 10: note = RNA
  misc_feature 12..21: note = RNA
  misc_feature 9: note = DNA
  misc_feature 11: note = DNA
gatccacattgagggccggaa

SEQ ID NO: 474 - DNA, 21 bp, synthetic construct
  source 1..21: mol_type = other DNA
  modified_base 1: mod_base = OTHER; note = 2'-O-methylguanosine-3'-phosphorothioate
  modified_base 2: mod_base = OTHER; note = 2'-O-methylcytidine-3'-phosphorothioate
  modified_base 3: mod_base = OTHER; note = 2'-O-methyluridine-3'-phosphate
  modified_base 4: mod_base = OTHER; note = 2'-O-methylguanosine-3'-phosphate
  modified_base 5: mod_base = OTHER; note = 2'-O-methyluridine-3'-phosphate
  modified_base 6: mod_base = OTHER; note = 2'-O-methyluridine-3'-phosphate
  modified_base 7: mod_base = OTHER; note = 2'-O-methyluridine-3'-phosphate
  modified_base 8: mod_base = OTHER; note = 2'-O-methylguanosine-3'-phosphate
  modified_base 10: mod_base = OTHER; note = 2'-O-methylcytidine-3'-phosphate
  modified_base 12: mod_base = OTHER; note = 2'-O-methyladenosine-3'-phosphate
  modified_base 13: mod_base = OTHER; note = 2'-O-methylcytidine-3'-phosphate
  modified_base 14: mod_base = OTHER; note = 2'-O-methylguanosine-3'-phosphate
  modified_base 15: mod_base = OTHER; note = 2'-O-methylguanosine-3'-phosphate
  modified_base 16: mod_base = OTHER; note = 2'-O-methyladenosine-3'-phosphate
  modified_base 17: mod_base = OTHER; note = 2'-O-methylguanosine-3'-phosphate
  modified_base 18: mod_base = OTHER; note = 2'-O-methyladenosine-3'-phosphate
  modified_base 19: mod_base = OTHER; note = 2'-O-methylcytidine-3'-phosphate
  modified_base 20: mod_base = OTHER; note = 2'-O-methylguanosine-3'-phosphate
  modified_base 21: mod_base = OTHER; note = 2'-O-methyluridine-3'-phosphate ((2S,4R)-1-[29-[[2-(acetylamino)-2-deoxy-beta-D-galactopyra nosyl]oxy]-14,14-bis[[3-[[3-[[5-[[2-(acetylamino)-2-deoxy-b eta-D-galactopyranosyl]oxy]-1-oxopentyl]amino]propyl]amino] -3-oxopropoxy]methyl]-1,12,19,25-tetraoxo-16-oxa-13,20,24-t riazanonacos-1-yl]-4-hydroxy-2-pyrrolidinyl)methyl ester
  misc_feature 1..8: note = RNA
  misc_feature 10: note = RNA
  misc_feature 12..21: note = RNA
  misc_feature 9: note = DNA
  misc_feature 11: note = DNA
gctgtttggctacggagacgt

SEQ ID NO: 475 - DNA, 21 bp, synthetic construct
  source 1..21: mol_type = other DNA
  modified_base 1: mod_base = OTHER; note = 2'-O-methylcytidine-3'-phosphorothioate
  modified_base 2: mod_base = OTHER; note = 2'-O-methyluridine-3'-phosphorothioate
  modified_base 3: mod_base = OTHER; note = 2'-O-methylguanosine-3'-phosphate
  modified_base 4: mod_base = OTHER; note = 2'-O-methylcytidine-3'-phosphate
  modified_base 5: mod_base = OTHER; note = 2'-O-methylcytidine-3'-phosphate
  modified_base 6: mod_base = OTHER; note = 2'-O-methyladenosine-3'-phosphate
  modified_base 7: mod_base = OTHER; note = 2'-O-methyluridine-3'-phosphate
  modified_base 8: mod_base = OTHER; note = 2'-O-methyluridine-3'-phosphate
  modified_base 10: mod_base = OTHER; note = 2'-O-methyladenosine-3'-phosphate
  modified_base 12: mod_base = OTHER; note = 2'-O-methyluridine-3'-phosphate
  modified_base 13: mod_base = OTHER; note = 2'-O-methyluridine-3'-phosphate
  modified_base 14: mod_base = OTHER; note = 2'-O-methyladenosine-3'-phosphate
  modified_base 15: mod_base = OTHER; note = 2'-O-methylguanosine-3'-phosphate
  modified_base 16: mod_base = OTHER; note = 2'-O-methylcytidine-3'-phosphate
  modified_base 17: mod_base = OTHER; note = 2'-O-methyluridine-3'-phosphate
  modified_base 18: mod_base = OTHER; note = 2'-O-methylguanosine-3'-phosphate
  modified_base 19: mod_base = OTHER; note = 2'-O-methylcytidine-3'-phosphate
  modified_base 20: mod_base = OTHER; note = 2'-O-methyladenosine-3'-phosphate
  modified_base 21: mod_base = OTHER; note = 2'-O-methyluridine-3'-phosphate ((2S,4R)-1-[29-[[2-(acetylamino)-2-deoxy-beta-D-galactopyra nosyl]oxy]-14,14-bis[[3-[[3-[[5-[[2-(acetylamino)-2-deoxy-b eta-D-galactopyranosyl]oxy]-1-oxopentyl]amino]propyl]amino] -3-oxopropoxy]methyl]-1,12,19,25-tetraoxo-16-oxa-13,20,24-t riazanonacos-1-yl]-4-hydroxy-2-pyrrolidinyl)methyl ester
  misc_feature 1..8: note = RNA
  misc_feature 10: note = RNA
  misc_feature 12..21: note = RNA
  misc_feature 9: note = DNA
  misc_feature 11: note = DNA
ctgccatttaattagctgcat

SEQ ID NO: 476 - DNA, 21 bp, synthetic construct
  source 1..21: mol_type = other DNA
  modified_base 1: mod_base = OTHER; note = 2'-O-methylguanosine-3'-phosphorothioate
  modified_base 2: mod_base = OTHER; note = 2'-O-methyladenosine-3'-phosphorothioate
  modified_base 3: mod_base = OTHER; note = 2'-O-methylguanosine-3'-phosphate
  modified_base 4: mod_base = OTHER; note = 2'-O-methyladenosine-3'-phosphate
  modified_base 5: mod_base = OTHER; note = 2'-O-methyladenosine-3'-phosphate
  modified_base 6: mod_base = OTHER; note = 2'-O-methylguanosine-3'-phosphate
  modified_base 7: mod_base = OTHER; note = 2'-O-methylcytidine-3'-phosphate
  modified_base 8: mod_base = OTHER; note = 2'-O-methyladenosine-3'-phosphate
  modified_base 10: mod_base = OTHER; note = 2'-O-methyladenosine-3'-phosphate
  modified_base 12: mod_base = OTHER; note = 2'-O-methylcytidine-3'-phosphate
  modified_base 13: mod_base = OTHER; note = 2'-O-methylcytidine-3'-phosphate
  modified_base 14: mod_base = OTHER; note = 2'-O-methyluridine-3'-phosphate
  modified_base 15: mod_base = OTHER; note = 2'-O-methylguanosine-3'-phosphate
  modified_base 16: mod_base = OTHER; note = 2'-O-methyluridine-3'-phosphate
  modified_base 17: mod_base = OTHER; note = 2'-O-methylguanosine-3'-phosphate
  modified_base 18: mod_base = OTHER; note = 2'-O-methylcytidine-3'-phosphate
  modified_base 19: mod_base = OTHER; note = 2'-O-methylguanosine-3'-phosphate
  modified_base 20: mod_base = OTHER; note = 2'-O-methyluridine-3'-phosphate
  modified_base 21: mod_base = OTHER; note = 2'-O-methyluridine-3'-phosphate ((2S,4R)-1-[29-[[2-(acetylamino)-2-deoxy-beta-D-galactopyra nosyl]oxy]-14,14-bis[[3-[[3-[[5-[[2-(acetylamino)-2-deoxy-b eta-D-galactopyranosyl]oxy]-1-oxopentyl]amino]propyl]amino] -3-oxopropoxy]methyl]-1,12,19,25-tetraoxo-16-oxa-13,20,24-t riazanonacos-1-yl]-4-hydroxy-2-pyrrolidinyl)methyl ester
  misc_feature 1..8: note = RNA
  misc_feature 10: note = RNA
  misc_feature 12..21: note = RNA
  misc_feature 9: note = DNA
  misc_feature 11: note = DNA
gagaagcagatcctgtgcgtt

SEQ ID NO: 477 - DNA, 21 bp, synthetic construct
  source 1..21: mol_type = other DNA
  modified_base 1: mod_base = OTHER; note = 2'-O-methyluridine-3'-phosphorothioate
  modified_base 2: mod_base = OTHER; note = 2'-O-methylguanosine-3'-phosphorothioate
  modified_base 3: mod_base = OTHER; note = 2'-O-methyladenosine-3'-phosphate
  modified_base 4: mod_base = OTHER; note = 2'-O-methylguanosine-3'-phosphate
  modified_base 5: mod_base = OTHER; note = 2'-O-methyluridine-3'-phosphate
  modified_base 6: mod_base = OTHER; note = 2'-O-methylcytidine-3'-phosphate
  modified_base 7: mod_base = OTHER; note = 2'-O-methylcytidine-3'-phosphate
  modified_base 8: mod_base = OTHER; note = 2'-O-methyladenosine-3'-phosphate
  modified_base 10: mod_base = OTHER; note = 2'-O-methylcytidine-3'-phosphate
  modified_base 12: mod_base = OTHER; note = 2'-O-methylguanosine-3'-phosphate
  modified_base 13: mod_base = OTHER; note = 2'-O-methyladenosine-3'-phosphate
  modified_base 14: mod_base = OTHER; note = 2'-O-methylcytidine-3'-phosphate
  modified_base 15: mod_base = OTHER; note = 2'-O-methyladenosine-3'-phosphate
  modified_base 16: mod_base = OTHER; note = 2'-O-methyladenosine-3'-phosphate
  modified_base 17: mod_base = OTHER; note = 2'-O-methylguanosine-3'-phosphate
  modified_base 18: mod_base = OTHER; note = 2'-O-methylcytidine-3'-phosphate
  modified_base 19: mod_base = OTHER; note = 2'-O-methylguanosine-3'-phosphate
  modified_base 20: mod_base = OTHER; note = 2'-O-methyladenosine-3'-phosphate
  modified_base 21: mod_base = OTHER; note = 2'-O-methyluridine-3'-phosphate ((2S,4R)-1-[29-[[2-(acetylamino)-2-deoxy-beta-D-galactopyra nosyl]oxy]-14,14-bis[[3-[[3-[[5-[[2-(acetylamino)-2-deoxy-b eta-D-galactopyranosyl]oxy]-1-oxopentyl]amino]propyl]amino] -3-oxopropoxy]methyl]-1,12,19,25-tetraoxo-16-oxa-13,20,24-t riazanonacos-1-yl]-4-hydroxy-2-pyrrolidinyl)methyl ester
  misc_feature 1..8: note = RNA
  misc_feature 10: note = RNA
  misc_feature 12..21: note = RNA
  misc_feature 9: note = DNA
  misc_feature 11: note = DNA
tgagtccatctgacaagcgat

SEQ ID NO: 478 - DNA, 21 bp, synthetic construct
  source 1..21: mol_type = other DNA
  modified_base 1: mod_base = OTHER; note = 2'-O-methylcytidine-3'-phosphorothioate
  modified_base 2: mod_base = OTHER; note = 2'-O-methyladenosine-3'-phosphorothioate
  modified_base 3: mod_base = OTHER; note = 2'-O-methyluridine-3'-phosphate
  modified_base 4: mod_base = OTHER; note = 2'-O-methyluridine-3'-phosphate
  modified_base 5: mod_base = OTHER; note = 2'-O-methylcytidine-3'-phosphate
  modified_base 6: mod_base = OTHER; note = 2'-O-methyluridine-3'-phosphate
  modified_base 7: mod_base = OTHER; note = 2'-O-methylcytidine-3'-phosphate
  modified_base 8: mod_base = OTHER; note = 2'-O-methylguanosine-3'-phosphate
  modified_base 10: mod_base = OTHER; note = 2'-O-methylguanosine-3'-phosphate
  modified_base 12: mod_base = OTHER; note = 2'-O-methyluridine-3'-phosphate
  modified_base 13: mod_base = OTHER; note = 2'-O-methylcytidine-3'-phosphate
  modified_base 14: mod_base = OTHER; note = 2'-O-methylguanosine-3'-phosphate
  modified_base 15: mod_base = OTHER; note = 2'-O-methylcytidine-3'-phosphate
  modified_base 16: mod_base = OTHER; note = 2'-O-methyluridine-3'-phosphate
  modified_base 17: mod_base = OTHER; note = 2'-O-methyluridine-3'-phosphate
  modified_base 18: mod_base = OTHER; note = 2'-O-methyladenosine-3'-phosphate
  modified_base 19: mod_base = OTHER; note = 2'-O-methylguanosine-3'-phosphate
  modified_base 20: mod_base = OTHER; note = 2'-O-methylcytidine-3'-phosphate
  modified_base 21: mod_base = OTHER; note = 2'-O-methyluridine-3'-phosphate ((2S,4R)-1-[29-[[2-(acetylamino)-2-deoxy-beta-D-galactopyra nosyl]oxy]-14,14-bis[[3-[[3-[[5-[[2-(acetylamino)-2-deoxy-b eta-D-galactopyranosyl]oxy]-1-oxopentyl]amino]propyl]amino] -3-oxopropoxy]methyl]-1,12,19,25-tetraoxo-16-oxa-13,20,24-t riazanonacos-1-yl]-4-hydroxy-2-pyrrolidinyl)methyl ester
  misc_feature 1..8: note = RNA
  misc_feature 10: note = RNA
  misc_feature 12..21: note = RNA
  misc_feature 9: note = DNA
  misc_feature 11: note = DNA
cattctcgagatcgcttagct

SEQ ID NO: 479 - DNA, 21 bp, synthetic construct
  source 1..21: mol_type = other DNA
  modified_base 1: mod_base = OTHER; note = 2'-O-methylguanosine-3'-phosphorothioate
  modified_base 2: mod_base = OTHER; note = 2'-O-methyladenosine-3'-phosphorothioate
  modified_base 3: mod_base = OTHER; note = 2'-O-methylguanosine-3'-phosphate
  modified_base 4: mod_base = OTHER; note = 2'-O-methyluridine-3'-phosphate
  modified_base 5: mod_base = OTHER; note = 2'-O-methylcytidine-3'-phosphate
  modified_base 6: mod_base = OTHER; note = 2'-O-methylcytidine-3'-phosphate
  modified_base 7: mod_base = OTHER; note = 2'-O-methyladenosine-3'-phosphate
  modified_base 8: mod_base = OTHER; note = 2'-O-methyluridine-3'-phosphate
  modified_base 10: mod_base = OTHER; note = 2'-O-methyluridine-3'-phosphate
  modified_base 12: mod_base = OTHER; note = 2'-O-methyladenosine-3'-phosphate
  modified_base 13: mod_base = OTHER; note = 2'-O-methylcytidine-3'-phosphate
  modified_base 14: mod_base = OTHER; note = 2'-O-methyladenosine-3'-phosphate
  modified_base 15: mod_base = OTHER; note = 2'-O-methyladenosine-3'-phosphate
  modified_base 16: mod_base = OTHER; note = 2'-O-methylguanosine-3'-phosphate
  modified_base 17: mod_base = OTHER; note = 2'-O-methylcytidine-3'-phosphate
  modified_base 18: mod_base = OTHER; note = 2'-O-methylguanosine-3'-phosphate
  modified_base 19: mod_base = OTHER; note = 2'-O-methyladenosine-3'-phosphate
  modified_base 20: mod_base = OTHER; note = 2'-O-methylguanosine-3'-phosphate
  modified_base 21: mod_base = OTHER; note = 2'-O-methyluridine-3'-phosphate ((2S,4R)-1-[29-[[2-(acetylamino)-2-deoxy-beta-D-galactopyra nosyl]oxy]-14,14-bis[[3-[[3-[[5-[[2-(acetylamino)-2-deoxy-b eta-D-galactopyranosyl]oxy]-1-oxopentyl]amino]propyl]amino] -3-oxopropoxy]methyl]-1,12,19,25-tetraoxo-16-oxa-13,20,24-t riazanonacos-1-yl]-4-hydroxy-2-pyrrolidinyl)methyl ester
  misc_feature 1..8: note = RNA
  misc_feature 10: note = RNA
  misc_feature 12..21: note = RNA
  misc_feature 9: note = DNA
  misc_feature 11: note = DNA
gagtccatctgacaagcgagt

SEQ ID NO: 480 - DNA, 21 bp, synthetic construct
  source 1..21: mol_type = other DNA
  modified_base 1: mod_base = OTHER; note = 2'-O-methyladenosine-3'-phosphorothioate
  modified_base 2: mod_base = OTHER; note = 2'-O-methyladenosine-3'-phosphorothioate
  modified_base 3: mod_base = OTHER; note = 2'-O-methylguanosine-3'-phosphate
  modified_base 4: mod_base = OTHER; note = 2'-O-methyladenosine-3'-phosphate
  modified_base 5: mod_base = OTHER; note = 2'-O-methyluridine-3'-phosphate
  modified_base 6: mod_base = OTHER; note = 2'-O-methylguanosine-3'-phosphate
  modified_base 7: mod_base = OTHER; note = 2'-O-methylcytidine-3'-phosphate
  modified_base 8: mod_base = OTHER; note = 2'-O-methyluridine-3'-phosphate
  modified_base 10: mod_base = OTHER; note = 2'-O-methylcytidine-3'-phosphate
  modified_base 12: mod_base = OTHER; note = 2'-O-methylguanosine-3'-phosphate
  modified_base 13: mod_base = OTHER; note = 2'-O-methylcytidine-3'-phosphate
  modified_base 14: mod_base = OTHER; note = 2'-O-methylguanosine-3'-phosphate
  modified_base 15: mod_base = OTHER; note = 2'-O-methylguanosine-3'-phosphate
  modified_base 16: mod_base = OTHER; note = 2'-O-methyladenosine-3'-phosphate
  modified_base 17: mod_base = OTHER; note = 2'-O-methyluridine-3'-phosphate
  modified_base 18: mod_base = OTHER; note = 2'-O-methyladenosine-3'-phosphate
  modified_base 19: mod_base = OTHER; note = 2'-O-methylguanosine-3'-phosphate
  modified_base 20: mod_base = OTHER; note = 2'-O-methyladenosine-3'-phosphate
  modified_base 21: mod_base = OTHER; note = 2'-O-methyluridine-3'-phosphate ((2S,4R)-1-[29-[[2-(acetylamino)-2-deoxy-beta-D-galactopyra nosyl]oxy]-14,14-bis[[3-[[3-[[5-[[2-(acetylamino)-2-deoxy-b eta-D-galactopyranosyl]oxy]-1-oxopentyl]amino]propyl]amino] -3-oxopropoxy]methyl]-1,12,19,25-tetraoxo-16-oxa-13,20,24-t riazanonacos-1-yl]-4-hydroxy-2-pyrrolidinyl)methyl ester
  misc_feature 1..8: note = RNA
  misc_feature 10: note = RNA
  misc_feature 12..21: note = RNA
  misc_feature 9: note = DNA
  misc_feature 11: note = DNA
aagatgctgcagcggatagat

SEQ ID NO: 481 - DNA, 21 bp, synthetic construct
  source 1..21: mol_type = other DNA
  modified_base 1: mod_base = OTHER; note = 2'-O-methyladenosine-3'-phosphorothioate
  modified_base 2: mod_base = OTHER; note = 2'-O-methyluridine-3'-phosphorothioate
  modified_base 3: mod_base = OTHER; note = 2'-O-methyluridine-3'-phosphate
  modified_base 4: mod_base = OTHER; note = 2'-O-methylcytidine-3'-phosphate
  modified_base 5: mod_base = OTHER; note = 2'-O-methyluridine-3'-phosphate
  modified_base 6: mod_base = OTHER; note = 2'-O-methylcytidine-3'-phosphate
  modified_base 7: mod_base = OTHER; note = 2'-O-methylguanosine-3'-phosphate
  modified_base 8: mod_base = OTHER; note = 2'-O-methyladenosine-3'-phosphate
  modified_base 10: mod_base = OTHER; note = 2'-O-methyladenosine-3'-phosphate
  modified_base 12: mod_base = OTHER; note = 2'-O-methylcytidine-3'-phosphate
  modified_base 13: mod_base = OTHER; note = 2'-O-methylguanosine-3'-phosphate
  modified_base 14: mod_base = OTHER; note = 2'-O-methylcytidine-3'-phosphate
  modified_base 15: mod_base = OTHER; note = 2'-O-methyluridine-3'-phosphate
  modified_base 16: mod_base = OTHER; note = 2'-O-methyluridine-3'-phosphate
  modified_base 17: mod_base = OTHER; note = 2'-O-methyladenosine-3'-phosphate
  modified_base 18: mod_base = OTHER; note = 2'-O-methylguanosine-3'-phosphate
  modified_base 19: mod_base = OTHER; note = 2'-O-methylcytidine-3'-phosphate
  modified_base 20: mod_base = OTHER; note = 2'-O-methylcytidine-3'-phosphate
  modified_base 21: mod_base = OTHER; note = 2'-O-methyluridine-3'-phosphate ((2S,4R)-1-[29-[[2-(acetylamino)-2-deoxy-beta-D-galactopyra nosyl]oxy]-14,14-bis[[3-[[3-[[5-[[2-(acetylamino)-2-deoxy-b eta-D-galactopyranosyl]oxy]-1-oxopentyl]amino]propyl]amino] -3-oxopropoxy]methyl]-1,12,19,25-tetraoxo-16-oxa-13,20,24-t riazanonacos-1-yl]-4-hydroxy-2-pyrrolidinyl)methyl ester
  misc_feature 1..8: note = RNA
  misc_feature 10: note = RNA
  misc_feature 12..21: note = RNA
  misc_feature 9: note = DNA
  misc_feature 11: note = DNA
attctcgagatcgcttagcct

SEQ ID NO: 482 - DNA, 21 bp, synthetic construct
  source 1..21: mol_type = other DNA
  modified_base 1: mod_base = OTHER; note = 2'-O-methylguanosine-3'-phosphorothioate
  modified_base 2: mod_base = OTHER; note = 2'-O-methylcytidine-3'-phosphorothioate
  modified_base 3: mod_base = OTHER; note = 2'-O-methyluridine-3'-phosphate
  modified_base 4: mod_base = OTHER; note = 2'-O-methylguanosine-3'-phosphate
  modified_base 5: mod_base = OTHER; note = 2'-O-methyladenosine-3'-phosphate
  modified_base 6: mod_base = OTHER; note = 2'-O-methylguanosine-3'-phosphate
  modified_base 7: mod_base = OTHER; note = 2'-O-methyladenosine-3'-phosphate
  modified_base 8: mod_base = OTHER; note = 2'-O-methyladenosine-3'-phosphate
  modified_base 10: mod_base = OTHER; note = 2'-O-methyluridine-3'-phosphate
  modified_base 12: mod_base = OTHER; note = 2'-O-methylguanosine-3'-phosphate
  modified_base 13: mod_base = OTHER; note = 2'-O-methylguanosine-3'-phosphate
  modified_base 14: mod_base = OTHER; note = 2'-O-methyladenosine-3'-phosphate
  modified_base 15: mod_base = OTHER; note = 2'-O-methylguanosine-3'-phosphate
  modified_base 16: mod_base = OTHER; note = 2'-O-methylguanosine-3'-phosphate
  modified_base 17: mod_base = OTHER; note = 2'-O-methylcytidine-3'-phosphate
  modified_base 18: mod_base = OTHER; note = 2'-O-methylguanosine-3'-phosphate
  modified_base 19: mod_base = OTHER; note = 2'-O-methyluridine-3'-phosphate
  modified_base 20: mod_base = OTHER; note = 2'-O-methyluridine-3'-phosphate
  modified_base 21: mod_base = OTHER; note = 2'-O-methyluridine-3'-phosphate ((2S,4R)-1-[29-[[2-(acetylamino)-2-deoxy-beta-D-galactopyra nosyl]oxy]-14,14-bis[[3-[[3-[[5-[[2-(acetylamino)-2-deoxy-b eta-D-galactopyranosyl]oxy]-1-oxopentyl]amino]propyl]amino] -3-oxopropoxy]methyl]-1,12,19,25-tetraoxo-16-oxa-13,20,24-t riazanonacos-1-yl]-4-hydroxy-2-pyrrolidinyl)methyl ester
  misc_feature 1..8: note = RNA
  misc_feature 10: note = RNA
  misc_feature 12..21: note = RNA
  misc_feature 9: note = DNA
  misc_feature 11: note = DNA
gctgagaagtgggaggcgttt

SEQ ID NO: 483 - DNA, 21 bp, synthetic construct
  source 1..21: mol_type = other DNA
  modified_base 1: mod_base = OTHER; note = 2'-O-methyladenosine-3'-phosphorothioate
  modified_base 2: mod_base = OTHER; note = 2'-O-methyluridine-3'-phosphorothioate
  modified_base 3: mod_base = OTHER; note = 2'-O-methylguanosine-3'-phosphate
  modified_base 4: mod_base = OTHER; note = 2'-O-methylcytidine-3'-phosphate
  modified_base 5: mod_base = OTHER; note = 2'-O-methyluridine-3'-phosphate
  modified_base 6: mod_base = OTHER; note = 2'-O-methylguanosine-3'-phosphate
  modified_base 7: mod_base = OTHER; note = 2'-O-methylcytidine-3'-phosphate
  modified_base 8: mod_base = OTHER; note = 2'-O-methyladenosine-3'-phosphate
  modified_base 10: mod_base = OTHER; note = 2'-O-methylcytidine-3'-phosphate
  modified_base 12: mod_base = OTHER; note = 2'-O-methylguanosine-3'-phosphate
  modified_base 13: mod_base = OTHER; note = 2'-O-methyladenosine-3'-phosphate
  modified_base 14: mod_base = OTHER; note = 2'-O-methyluridine-3'-phosphate
  modified_base 15: mod_base = OTHER; note = 2'-O-methyladenosine-3'-phosphate
  modified_base 16: mod_base = OTHER; note = 2'-O-methylguanosine-3'-phosphate
  modified_base 17: mod_base = OTHER; note = 2'-O-methyladenosine-3'-phosphate
  modified_base 18: mod_base = OTHER; note = 2'-O-methylcytidine-3'-phosphate
  modified_base 19: mod_base = OTHER; note = 2'-O-methylguanosine-3'-phosphate
  modified_base 20: mod_base = OTHER; note = 2'-O-methylcytidine-3'-phosphate
  modified_base 21: mod_base = OTHER; note = 2'-O-methyladenosine-3'-phosphate ((2S,4R)-1-[29-[[2-(acetylamino)-2-deoxy-beta-D-galactopyra nosyl]oxy]-14,14-bis[[3-[[3-[[5-[[2-(acetylamino)-2-deoxy-b eta-D-galactopyranosyl]oxy]-1-oxopentyl]amino]propyl]amino] -3-oxopropoxy]methyl]-1,12,19,25-tetraoxo-16-oxa-13,20,24-t riazanonacos-1-yl]-4-hydroxy-2-pyrrolidinyl)methyl ester
  misc_feature 1..8: note = RNA
  misc_feature 10: note = RNA
  misc_feature 12..21: note = RNA
  misc_feature 9: note = DNA
  misc_feature 11: note = DNA
atgctgcagcggatagacgca

SEQ ID NO: 484 - DNA, 21 bp, synthetic construct
  source 1..21: mol_type = other DNA
  modified_base 1: mod_base = OTHER; note = 2'-O-methyluridine-3'-phosphorothioate
  modified_base 2: mod_base = OTHER; note = 2'-O-methylcytidine-3'-phosphorothioate
  modified_base 3: mod_base = OTHER; note = 2'-O-methyluridine-3'-phosphate
  modified_base 4: mod_base = OTHER; note = 2'-O-methylcytidine-3'-phosphate
  modified_base 5: mod_base = OTHER; note = 2'-O-methyluridine-3'-phosphate
  modified_base 6: mod_base = OTHER; note = 2'-O-methyluridine-3'-phosphate
  modified_base 7: mod_base = OTHER; note = 2'-O-methyluridine-3'-phosphate
  modified_base 8: mod_base = OTHER; note = 2'-O-methylguanosine-3'-phosphate
  modified_base 10: mod_base = OTHER; note = 2'-O-methyladenosine-3'-phosphate
  modified_base 12: mod_base = OTHER; note = 2'-O-methyluridine-3'-phosphate
  modified_base 13: mod_base = OTHER; note = 2'-O-methylcytidine-3'-phosphate
  modified_base 14: mod_base = OTHER; note = 2'-O-methyluridine-3'-phosphate
  modified_base 15: mod_base = OTHER; note = 2'-O-methylcytidine-3'-phosphate
  modified_base 16: mod_base = OTHER; note = 2'-O-methylguanosine-3'-phosphate
  modified_base 17: mod_base = OTHER; note = 2'-O-methyladenosine-3'-phosphate
  modified_base 18: mod_base = OTHER; note = 2'-O-methylguanosine-3'-phosphate
  modified_base 19: mod_base = OTHER; note = 2'-O-methyladenosine-3'-phosphate
  modified_base 20: mod_base = OTHER; note = 2'-O-methyluridine-3'-phosphate
  modified_base 21: mod_base = OTHER; note = 2'-O-methyluridine-3'-phosphate ((2S,4R)-1-[29-[[2-(acetylamino)-2-deoxy-beta-D-galactopyra nosyl]oxy]-14,14-bis[[3-[[3-[[5-[[2-(acetylamino)-2-deoxy-b eta-D-galactopyranosyl]oxy]-1-oxopentyl]amino]propyl]amino] -3-oxopropoxy]methyl]-1,12,19,25-tetraoxo-16-oxa-13,20,24-t riazanonacos-1-yl]-4-hydroxy-2-pyrrolidinyl)methyl ester
  misc_feature 1..8: note = RNA
  misc_feature 10: note = RNA
  misc_feature 12..21: note = RNA
  misc_feature 9: note = DNA
  misc_feature 11: note = DNA
tctctttgcattctcgagatt

SEQ ID NO: 485 - DNA, 21 bp, synthetic construct
  source 1..21: mol_type = other DNA
  modified_base 1: mod_base = OTHER; note = 2'-O-methylcytidine-3'-phosphorothioate
  modified_base 2: mod_base = OTHER; note = 2'-O-methyluridine-3'-phosphorothioate
  modified_base 3: mod_base = OTHER; note = 2'-O-methylcytidine-3'-phosphate
  modified_base 4: mod_base = OTHER; note = 2'-O-methyluridine-3'-phosphate
  modified_base 5: mod_base = OTHER; note = 2'-O-methyluridine-3'-phosphate
  modified_base 6: mod_base = OTHER; note = 2'-O-methyluridine-3'-phosphate
  modified_base 7: mod_base = OTHER; note = 2'-O-methylguanosine-3'-phosphate
  modified_base 8: mod_base = OTHER; note = 2'-O-methylcytidine-3'-phosphate
  modified_base 10: mod_base = OTHER; note = 2'-O-methyluridine-3'-phosphate
  modified_base 12: mod_base = OTHER; note = 2'-O-methylcytidine-3'-phosphate
  modified_base 13: mod_base = OTHER; note = 2'-O-methyluridine-3'-phosphate
  modified_base 14: mod_base = OTHER; note = 2'-O-methylcytidine-3'-phosphate
  modified_base 15: mod_base = OTHER; note = 2'-O-methylguanosine-3'-phosphate
  modified_base 16: mod_base = OTHER; note = 2'-O-methyladenosine-3'-phosphate
  modified_base 17: mod_base = OTHER; note = 2'-O-methylguanosine-3'-phosphate
  modified_base 18: mod_base = OTHER; note = 2'-O-methyladenosine-3'-phosphate
  modified_base 19: mod_base = OTHER; note = 2'-O-methyluridine-3'-phosphate
  modified_base 20: mod_base = OTHER; note = 2'-O-methylcytidine-3'-phosphate
  modified_base 21: mod_base = OTHER; note = 2'-O-methyluridine-3'-phosphate ((2S,4R)-1-[29-[[2-(acetylamino)-2-deoxy-beta-D-galactopyra nosyl]oxy]-14,14-bis[[3-[[3-[[5-[[2-(acetylamino)-2-deoxy-b eta-D-galactopyranosyl]oxy]-1-oxopentyl]amino]propyl]amino] -3-oxopropoxy]methyl]-1,12,19,25-tetraoxo-16-oxa-13,20,24-t riazanonacos-1-yl]-4-hydroxy-2-pyrrolidinyl)methyl ester
  misc_feature 1..8: note = RNA
  misc_feature 10: note = RNA
  misc_feature 12..21: note = RNA
  misc_feature 9: note = DNA
  misc_feature 11: note = DNA
ctctttgcattctcgagatct

SEQ ID NO: 486 - DNA, 21 bp, synthetic construct
  source 1..21: mol_type = other DNA
  modified_base 1: mod_base = OTHER; note = 2'-O-methyluridine-3'-phosphorothioate
  modified_base 2: mod_base = OTHER; note = 2'-O-methylguanosine-3'-phosphorothioate
  modified_base 3: mod_base = OTHER; note = 2'-O-methylguanosine-3'-phosphate
  modified_base 4: mod_base = OTHER; note = 2'-O-methyladenosine-3'-phosphate
  modified_base 5: mod_base = OTHER; note = 2'-O-methylguanosine-3'-phosphate
  modified_base 6: mod_base = OTHER; note = 2'-O-methylcytidine-3'-phosphate
  modified_base 7: mod_base = OTHER; note = 2'-O-methylcytidine-3'-phosphate
  modified_base 8: mod_base = OTHER; note = 2'-O-methylcytidine-3'-phosphate
  modified_base 10: mod_base = OTHER; note = 2'-O-methylcytidine-3'-phosphate
  modified_base 12: mod_base = OTHER; note = 2'-O-methyluridine-3'-phosphate
  modified_base 13: mod_base = OTHER; note = 2'-O-methyluridine-3'-phosphate
  modified_base 14: mod_base = OTHER; note = 2'-O-methylguanosine-3'-phosphate
  modified_base 15: mod_base = OTHER; note = 2'-O-methylguanosine-3'-phosphate
  modified_base 16: mod_base = OTHER; note = 2'-O-methyladenosine-3'-phosphate
  modified_base 17: mod_base = OTHER; note = 2'-O-methyladenosine-3'-phosphate
  modified_base 18: mod_base = OTHER; note = 2'-O-methyluridine-3'-phosphate
  modified_base 19: mod_base = OTHER; note = 2'-O-methyluridine-3'-phosphate
  modified_base 20: mod_base = OTHER; note = 2'-O-methyladenosine-3'-phosphate
  modified_base 21: mod_base = OTHER; note = 2'-O-methyladenosine-3'-phosphate ((2S,4R)-1-[29-[[2-(acetylamino)-2-deoxy-beta-D-galactopyra nosyl]oxy]-14,14-bis[[3-[[3-[[5-[[2-(acetylamino)-2-deoxy-b eta-D-galactopyranosyl]oxy]-1-oxopentyl]amino]propyl]amino] -3-oxopropoxy]methyl]-1,12,19,25-tetraoxo-16-oxa-13,20,24-t riazanonacos-1-yl]-4-hydroxy-2-pyrrolidinyl)methyl ester
  misc_feature 1..8: note = RNA
  misc_feature 10: note = RNA
  misc_feature 12..21: note = RNA
  misc_feature 9: note = DNA
  misc_feature 11: note = DNA
tggagcccaccttggaattaa

SEQ ID NO: 487 - DNA, 21 bp, synthetic construct
  source 1..21: mol_type = other DNA
  modified_base 1: mod_base = OTHER; note = 2'-O-methylcytidine-3'-phosphorothioate
  modified_base 2: mod_base = OTHER; note = 2'-O-methylcytidine-3'-phosphorothioate
  modified_base 3: mod_base = OTHER; note = 2'-O-methylcytidine-3'-phosphate
  modified_base 4: mod_base = OTHER; note = 2'-O-methyladenosine-3'-phosphate
  modified_base 5: mod_base = OTHER; note = 2'-O-methylguanosine-3'-phosphate
  modified_base 6: mod_base = OTHER; note = 2'-O-methyluridine-3'-phosphate
  modified_base 7: mod_base = OTHER; note = 2'-O-methyluridine-3'-phosphate
  modified_base 8: mod_base = OTHER; note = 2'-O-methylcytidine-3'-phosphate
  modified_base 10: mod_base = OTHER; note = 2'-O-methyladenosine-3'-phosphate
  modified_base 12: mod_base = OTHER; note = 2'-O-methyluridine-3'-phosphate
  modified_base 13: mod_base = OTHER; note = 2'-O-methylguanosine-3'-phosphate
  modified_base 14: mod_base = OTHER; note = 2'-O-methylguanosine-3'-phosphate
  modified_base 15: mod_base = OTHER; note = 2'-O-methyladenosine-3'-phosphate
  modified_base 16: mod_base = OTHER; note = 2'-O-methyluridine-3'-phosphate
  modified_base 17: mod_base = OTHER; note = 2'-O-methylcytidine-3'-phosphate
  modified_base 18: mod_base = OTHER; note = 2'-O-methylcytidine-3'-phosphate
  modified_base 19: mod_base = OTHER; note = 2'-O-methyladenosine-3'-phosphate
  modified_base 20: mod_base = OTHER; note = 2'-O-methylcytidine-3'-phosphate
  modified_base 21: mod_base = OTHER; note = 2'-O-methyladenosine-3'-phosphate ((2S,4R)-1-[29-[[2-(acetylamino)-2-deoxy-beta-D-galactopyra nosyl]oxy]-14,14-bis[[3-[[3-[[5-[[2-(acetylamino)-2-deoxy-b eta-D-galactopyranosyl]oxy]-1-oxopentyl]amino]propyl]amino] -3-oxopropoxy]methyl]-1,12,19,25-tetraoxo-16-oxa-13,20,24-t riazanonacos-1-yl]-4-hydroxy-2-pyrrolidinyl)methyl ester
  misc_feature 1..8: note = RNA
  misc_feature 10: note = RNA
  misc_feature 12..21: note = RNA
  misc_feature 9: note = DNA
  misc_feature 11: note = DNA
cccagttcaagtggatccaca

SEQ ID NO: 488 - DNA, 21 bp, synthetic construct
  source 1..21: mol_type = other DNA
  modified_base 1: mod_base = OTHER; note = 2'-O-methylcytidine-3'-phosphorothioate
  modified_base 2: mod_base = OTHER; note = 2'-O-methylcytidine-3'-phosphorothioate
  modified_base 3: mod_base = OTHER; note = 2'-O-methyluridine-3'-phosphate
  modified_base 4: mod_base = OTHER; note = 2'-O-methylguanosine-3'-phosphate
  modified_base 5: mod_base = OTHER; note = 2'-O-methylguanosine-3'-phosphate
  modified_base 6: mod_base = OTHER; note = 2'-O-methyluridine-3'-phosphate
  modified_base 7: mod_base = OTHER; note = 2'-O-methylguanosine-3'-phosphate
  modified_base 8: mod_base = OTHER; note = 2'-O-methylguanosine-3'-phosphate
  modified_base 10: mod_base = OTHER; note = 2'-O-methylcytidine-3'-phosphate
  modified_base 12: mod_base = OTHER; note = 2'-O-methyladenosine-3'-phosphate
  modified_base 13: mod_base = OTHER; note = 2'-O-methylguanosine-3'-phosphate
  modified_base 14: mod_base = OTHER; note = 2'-O-methyluridine-3'-phosphate
  modified_base 15: mod_base = OTHER; note = 2'-O-methyladenosine-3'-phosphate
  modified_base 16: mod_base = OTHER; note = 2'-O-methylcytidine-3'-phosphate
  modified_base 17: mod_base = OTHER; note = 2'-O-methylcytidine-3'-phosphate
  modified_base 18: mod_base = OTHER; note = 2'-O-methylcytidine-3'-phosphate
  modified_base 19: mod_base = OTHER; note = 2'-O-methyluridine-3'-phosphate
  modified_base 20: mod_base = OTHER; note = 2'-O-methyladenosine-3'-phosphate
  modified_base 21: mod_base = OTHER; note = 2'-O-methyladenosine-3'-phosphate ((2S,4R)-1-[29-[[2-(acetylamino)-2-deoxy-beta-D-galactopyra nosyl]oxy]-14,14-bis[[3-[[3-[[5-[[2-(acetylamino)-2-deoxy-b eta-D-galactopyranosyl]oxy]-1-oxopentyl]amino]propyl]amino] -3-oxopropoxy]methyl]-1,12,19,25-tetraoxo-16-oxa-13,20,24-t riazanonacos-1-yl]-4-hydroxy-2-pyrrolidinyl)methyl ester
  misc_feature 1..8: note = RNA
  misc_feature 10: note = RNA
  misc_feature 12..21: note = RNA
  misc_feature 9: note = DNA
  misc_feature 11: note = DNA
cctggtggacaagtaccctaa

SEQ ID NO: 489 - DNA, 21 bp, synthetic construct
  source 1..21: mol_type = other DNA
  modified_base 1: mod_base = OTHER; note = 2'-O-methyluridine-3'-phosphorothioate
  modified_base 2: mod_base = OTHER; note = 2'-O-methylcytidine-3'-phosphorothioate
  modified_base 3: mod_base = OTHER; note = 2'-O-methyluridine-3'-phosphate
  modified_base 4: mod_base = OTHER; note = 2'-O-methylcytidine-3'-phosphate
  modified_base 5: mod_base = OTHER; note = 2'-O-methylguanosine-3'-phosphate
  modified_base 6: mod_base = OTHER; note = 2'-O-methyladenosine-3'-phosphate
  modified_base 7: mod_base = OTHER; note = 2'-O-methylguanosine-3'-phosphate
  modified_base 8: mod_base = OTHER; note = 2'-O-methyladenosine-3'-phosphate
  modified_base 10: mod_base = OTHER; note = 2'-O-methylcytidine-3'-phosphate
  modified_base 12: mod_base = OTHER; note = 2'-O-methylcytidine-3'-phosphate
  modified_base 13: mod_base = OTHER; note = 2'-O-methyluridine-3'-phosphate
  modified_base 14: mod_base = OTHER; note = 2'-O-methyluridine-3'-phosphate
  modified_base 15: mod_base = OTHER; note = 2'-O-methyladenosine-3'-phosphate
  modified_base 16: mod_base = OTHER; note = 2'-O-methylguanosine-3'-phosphate
  modified_base 17: mod_base = OTHER; note = 2'-O-methylcytidine-3'-phosphate
  modified_base 18: mod_base = OTHER; note = 2'-O-methylcytidine-3'-phosphate
  modified_base 19: mod_base = OTHER; note = 2'-O-methylguanosine-3'-phosphate
  modified_base 20: mod_base = OTHER; note = 2'-O-methylcytidine-3'-phosphate
  modified_base 21: mod_base = OTHER; note = 2'-O-methyluridine-3'-phosphate ((2S,4R)-1-[29-[[2-(acetylamino)-2-deoxy-beta-D-galactopyra nosyl]oxy]-14,14-bis[[3-[[3-[[5-[[2-(acetylamino)-2-deoxy-b eta-D-galactopyranosyl]oxy]-1-oxopentyl]amino]propyl]amino] -3-oxopropoxy]methyl]-1,12,19,25-tetraoxo-16-oxa-13,20,24-t riazanonacos-1-yl]-4-hydroxy-2-pyrrolidinyl)methyl ester
  misc_feature 1..8: note = RNA
  misc_feature 10: note = RNA
  misc_feature 12..21: note = RNA
  misc_feature 9: note = DNA
  misc_feature 11: note = DNA
tctcgagatcgcttagccgct

SEQ ID NO: 490 - DNA, 21 bp, synthetic construct
  source 1..21: mol_type = other DNA
  modified_base 1: mod_base = OTHER; note = 2'-O-methyladenosine-3'-phosphorothioate
  modified_base 2: mod_base = OTHER; note = 2'-O-methylguanosine-3'-phosphorothioate
  modified_base 3: mod_base = OTHER; note = 2'-O-methyluridine-3'-phosphate
  modified_base 4: mod_base = OTHER; note = 2'-O-methylcytidine-3'-phosphate
  modified_base 5: mod_base = OTHER; note = 2'-O-methylcytidine-3'-phosphate
  modified_base 6: mod_base = OTHER; note = 2'-O-methyladenosine-3'-phosphate
  modified_base 7: mod_base = OTHER; note = 2'-O-methyluridine-3'-phosphate
  modified_base 8: mod_base = OTHER; note = 2'-O-methylcytidine-3'-phosphate
  modified_base 10: mod_base = OTHER; note = 2'-O-methylguanosine-3'-phosphate
  modified_base 12: mod_base = OTHER; note = 2'-O-methylcytidine-3'-phosphate
  modified_base 13: mod_base = OTHER; note = 2'-O-methyladenosine-3'-phosphate
  modified_base 14: mod_base = OTHER; note = 2'-O-methyladenosine-3'-phosphate
  modified_base 15: mod_base = OTHER; note = 2'-O-methylguanosine-3'-phosphate
  modified_base 16: mod_base = OTHER; note = 2'-O-methylcytidine-3'-phosphate
  modified_base 17: mod_base = OTHER; note = 2'-O-methylguanosine-3'-phosphate
  modified_base 18: mod_base = OTHER; note = 2'-O-methyladenosine-3'-phosphate
  modified_base 19: mod_base = OTHER; note = 2'-O-methylguanosine-3'-phosphate
  modified_base 20: mod_base = OTHER; note = 2'-O-methylguanosine-3'-phosphate
  modified_base 21: mod_base = OTHER; note = 2'-O-methyladenosine-3'-phosphate ((2S,4R)-1-[29-[[2-(acetylamino)-2-deoxy-beta-D-galactopyra nosyl]oxy]-14,14-bis[[3-[[3-[[5-[[2-(acetylamino)-2-deoxy-b eta-D-galactopyranosyl]oxy]-1-oxopentyl]amino]propyl]amino] -3-oxopropoxy]methyl]-1,12,19,25-tetraoxo-16-oxa-13,20,24-t riazanonacos-1-yl]-4-hydroxy-2-pyrrolidinyl)methyl ester
  misc_feature 1..8: note = RNA
  misc_feature 10: note = RNA
  misc_feature 12..21: note = RNA
  misc_feature 9: note = DNA
  misc_feature 11: note = DNA
agtccatctgacaagcgagga

SEQ ID NO: 491 - DNA, 21 bp, synthetic construct
  source 1..21: mol_type = other DNA
  modified_base 1: mod_base = OTHER; note = 2'-O-methyladenosine-3'-phosphorothioate
  modified_base 2: mod_base = OTHER; note = 2'-O-methylguanosine-3'-phosphorothioate
  modified_base 3: mod_base = OTHER; note = 2'-O-methylcytidine-3'-phosphate
  modified_base 4: mod_base = OTHER; note = 2'-O-methyluridine-3'-phosphate
  modified_base 5: mod_base = OTHER; note = 2'-O-methylguanosine-3'-phosphate
  modified_base 6: mod_base = OTHER; note = 2'-O-methyluridine-3'-phosphate
  modified_base 7: mod_base = OTHER; note = 2'-O-methyluridine-3'-phosphate
  modified_base 8: mod_base = OTHER; note = 2'-O-methyluridine-3'-phosphate
  modified_base 10: mod_base = OTHER; note = 2'-O-methylguanosine-3'-phosphate
  modified_base 12: mod_base = OTHER; note = 2'-O-methyluridine-3'-phosphate
  modified_base 13: mod_base = OTHER; note = 2'-O-methyladenosine-3'-phosphate
  modified_base 14: mod_base = OTHER; note = 2'-O-methylcytidine-3'-phosphate
  modified_base 15: mod_base = OTHER; note = 2'-O-methylguanosine-3'-phosphate
  modified_base 16: mod_base = OTHER; note = 2'-O-methylguanosine-3'-phosphate
  modified_base 17: mod_base = OTHER; note = 2'-O-methyladenosine-3'-phosphate
  modified_base 18: mod_base = OTHER; note = 2'-O-methylguanosine-3'-phosphate
  modified_base 19: mod_base = OTHER; note = 2'-O-methyladenosine-3'-phosphate
  modified_base 20: mod_base = OTHER; note = 2'-O-methylcytidine-3'-phosphate
  modified_base 21: mod_base = OTHER; note = 2'-O-methyluridine-3'-phosphate ((2S,4R)-1-[29-[[2-(acetylamino)-2-deoxy-beta-D-galactopyra nosyl]oxy]-14,14-bis[[3-[[3-[[5-[[2-(acetylamino)-2-deoxy-b eta-D-galactopyranosyl]oxy]-1-oxopentyl]amino]propyl]amino] -3-oxopropoxy]methyl]-1,12,19,25-tetraoxo-16-oxa-13,20,24-t riazanonacos-1-yl]-4-hydroxy-2-pyrrolidinyl)methyl ester
  misc_feature 1..8: note = RNA
  misc_feature 10: note = RNA
  misc_feature 12..21: note = RNA
  misc_feature 9: note = DNA
  misc_feature 11: note = DNA
agctgtttggctacggagact

SEQ ID NO: 492 - DNA, 21 bp, synthetic construct
  source 1..21: mol_type = other DNA
  modified_base 1: mod_base = OTHER; note = 2'-O-methylguanosine-3'-phosphorothioate
  modified_base 2: mod_base = OTHER; note = 2'-O-methyladenosine-3'-phosphorothioate
  modified_base 3: mod_base = OTHER; note = 2'-O-methyluridine-3'-phosphate
  modified_base 4: mod_base = OTHER; note = 2'-O-methylguanosine-3'-phosphate
  modified_base 5: mod_base = OTHER; note = 2'-O-methylcytidine-3'-phosphate
  modified_base 6: mod_base = OTHER; note = 2'-O-methyluridine-3'-phosphate
  modified_base 7: mod_base = OTHER; note = 2'-O-methylguanosine-3'-phosphate
  modified_base 8: mod_base = OTHER; note = 2'-O-methylcytidine-3'-phosphate
  modified_base 10: mod_base = OTHER; note = 2'-O-methylguanosine-3'-phosphate
  modified_base 12: mod_base = OTHER; note = 2'-O-methylguanosine-3'-phosphate
  modified_base 13: mod_base = OTHER; note = 2'-O-methylguanosine-3'-phosphate
  modified_base 14: mod_base = OTHER; note = 2'-O-methyladenosine-3'-phosphate
  modified_base 15: mod_base = OTHER; note = 2'-O-methyluridine-3'-phosphate
  modified_base 16: mod_base = OTHER; note = 2'-O-methyladenosine-3'-phosphate
  modified_base 17: mod_base = OTHER; note = 2'-O-methylguanosine-3'-phosphate
  modified_base 18: mod_base = OTHER; note = 2'-O-methyladenosine-3'-phosphate
  modified_base 19: mod_base = OTHER; note = 2'-O-methylcytidine-3'-phosphate
  modified_base 20: mod_base = OTHER; note = 2'-O-methylguanosine-3'-phosphate
  modified_base 21: mod_base = OTHER; note = 2'-O-methyluridine-3'-phosphate ((2S,4R)-1-[29-[[2-(acetylamino)-2-deoxy-beta-D-galactopyra nosyl]oxy]-14,14-bis[[3-[[3-[[5-[[2-(acetylamino)-2-deoxy-b eta-D-galactopyranosyl]oxy]-1-oxopentyl]amino]propyl]amino] -3-oxopropoxy]methyl]-1,12,19,25-tetraoxo-16-oxa-13,20,24-t riazanonacos-1-yl]-4-hydroxy-2-pyrrolidinyl)methyl ester
  misc_feature 1..8: note = RNA
  misc_feature 10: note = RNA
  misc_feature 12..21: note = RNA
  misc_feature 9: note = DNA
  misc_feature 11: note = DNA
gatgctgcagcggatagacgt

SEQ ID NO: 493 - DNA, 21 bp, synthetic construct
  source 1..21: mol_type = other DNA
  modified_base 1: mod_base = OTHER; note = 2'-O-methyladenosine-3'-phosphorothioate
  modified_base 2: mod_base = OTHER; note = 2'-O-methyladenosine-3'-phosphorothioate
  modified_base 3: mod_base = OTHER; note = 2'-O-methyluridine-3'-phosphate
  modified_base 4: mod_base = OTHER; note = 2'-O-methylcytidine-3'-phosphate
  modified_base 5: mod_base = OTHER; note = 2'-O-methyluridine-3'-phosphate
  modified_base 6: mod_base = OTHER; note = 2'-O-methylguanosine-3'-phosphate
  modified_base 7: mod_base = OTHER; note = 2'-O-methylcytidine-3'-phosphate
  modified_base 8: mod_base = OTHER; note = 2'-O-methylcytidine-3'-phosphate
  modified_base 10: mod_base = OTHER; note = 2'-O-methyluridine-3'-phosphate
  modified_base 12: mod_base = OTHER; note = 2'-O-methyluridine-3'-phosphate
  modified_base 13: mod_base = OTHER; note = 2'-O-methyladenosine-3'-phosphate
  modified_base 14: mod_base = OTHER; note = 2'-O-methyladenosine-3'-phosphate
  modified_base 15: mod_base = OTHER; note = 2'-O-methyluridine-3'-phosphate
  modified_base 16: mod_base = OTHER; note = 2'-O-methyluridine-3'-phosphate
  modified_base 17: mod_base = OTHER; note = 2'-O-methyladenosine-3'-phosphate
  modified_base 18: mod_base = OTHER; note = 2'-O-methylguanosine-3'-phosphate
  modified_base 19: mod_base = OTHER; note = 2'-O-methylcytidine-3'-phosphate
  modified_base 20: mod_base = OTHER; note = 2'-O-methyluridine-3'-phosphate
  modified_base 21: mod_base = OTHER; note = 2'-O-methyluridine-3'-phosphate ((2S,4R)-1-[29-[[2-(acetylamino)-2-deoxy-beta-D-galactopyra nosyl]oxy]-14,14-bis[[3-[[3-[[5-[[2-(acetylamino)-2-deoxy-b eta-D-galactopyranosyl]oxy]-1-oxopentyl]amino]propyl]amino] -3-oxopropoxy]methyl]-1,12,19,25-tetraoxo-16-oxa-13,20,24-t riazanonacos-1-yl]-4-hydroxy-2-pyrrolidinyl)methyl ester
  misc_feature 1..8: note = RNA
  misc_feature 10: note = RNA
  misc_feature 12..21: note = RNA
  misc_feature 9: note = DNA
  misc_feature 11: note = DNA
aatctgccatttaattagctt

SEQ ID NO: 494 - DNA, 21 bp, synthetic construct
  source 1..21: mol_type = other DNA
  modified_base 1: mod_base = OTHER; note = 2'-O-methylguanosine-3'-phosphorothioate
  modified_base 2: mod_base = OTHER; note = 2'-O-methylcytidine-3'-phosphorothioate
  modified_base 3: mod_base = OTHER; note = 2'-O-methyladenosine-3'-phosphate
  modified_base 4: mod_base = OTHER; note = 2'-O-methyluridine-3'-phosphate
  modified_base 5: mod_base = OTHER; note = 2'-O-methyluridine-3'-phosphate
  modified_base 6: mod_base = OTHER; note = 2'-O-methylcytidine-3'-phosphate
  modified_base 7: mod_base = OTHER; note = 2'-O-methyluridine-3'-phosphate
  modified_base 8: mod_base = OTHER; note = 2'-O-methylcytidine-3'-phosphate
  modified_base 10: mod_base = OTHER; note = 2'-O-methyladenosine-3'-phosphate
  modified_base 12: mod_base = OTHER; note = 2'-O-methyladenosine-3'-phosphate
  modified_base 13: mod_base = OTHER; note = 2'-O-methyluridine-3'-phosphate
  modified_base 14: mod_base = OTHER; note = 2'-O-methylcytidine-3'-phosphate
  modified_base 15: mod_base = OTHER; note = 2'-O-methylguanosine-3'-phosphate
  modified_base 16: mod_base = OTHER; note = 2'-O-methylcytidine-3'-phosphate
  modified_base 17: mod_base = OTHER; note = 2'-O-methyluridine-3'-phosphate
  modified_base 18: mod_base = OTHER; note = 2'-O-methyluridine-3'-phosphate
  modified_base 19: mod_base = OTHER; note = 2'-O-methyladenosine-3'-phosphate
  modified_base 20: mod_base = OTHER; note = 2'-O-methylguanosine-3'-phosphate
  modified_base 21: mod_base = OTHER; note = 2'-O-methyluridine-3'-phosphate ((2S,4R)-1-[29-[[2-(acetylamino)-2-deoxy-beta-D-galactopyra nosyl]oxy]-14,14-bis[[3-[[3-[[5-[[2-(acetylamino)-2-deoxy-b eta-D-galactopyranosyl]oxy]-1-oxopentyl]amino]propyl]amino] -3-oxopropoxy]methyl]-1,12,19,25-tetraoxo-16-oxa-13,20,24-t riazanonacos-1-yl]-4-hydroxy-2-pyrrolidinyl)methyl ester
  misc_feature 1..8: note = RNA
  misc_feature 10: note = RNA
  misc_feature 12..21: note = RNA
  misc_feature 9: note = DNA
  misc_feature 11: note = DNA
gcattctcgagatcgcttagt

SEQ ID NO: 495 - DNA, 21 bp, synthetic construct
  source 1..21: mol_type = other DNA
  modified_base 1: mod_base = OTHER; note = 2'-O-methyluridine-3'-phosphorothioate
  modified_base 2: mod_base = OTHER; note = 2'-O-methyluridine-3'-phosphorothioate
  modified_base 3: mod_base = OTHER; note = 2'-O-methylguanosine-3'-phosphate
  modified_base 4: mod_base = OTHER; note = 2'-O-methyluridine-3'-phosphate
  modified_base 5: mod_base = OTHER; note = 2'-O-methyladenosine-3'-phosphate
  modified_base 6: mod_base = OTHER; note = 2'-O-methyluridine-3'-phosphate
  modified_base 7: mod_base = OTHER; note = 2'-O-methylguanosine-3'-phosphate
  modified_base 8: mod_base = OTHER; note = 2'-O-methylguanosine-3'-phosphate
  modified_base 10: mod_base = OTHER; note = 2'-O-methylcytidine-3'-phosphate
  modified_base 12: mod_base = OTHER; note = 2'-O-methyluridine-3'-phosphate
  modified_base 13: mod_base = OTHER; note = 2'-O-methylguanosine-3'-phosphate
  modified_base 14: mod_base = OTHER; note = 2'-O-methyluridine-3'-phosphate
  modified_base 15: mod_base = OTHER; note = 2'-O-methylguanosine-3'-phosphate
  modified_base 16: mod_base = OTHER; note = 2'-O-methyladenosine-3'-phosphate
  modified_base 17: mod_base = OTHER; note = 2'-O-methylguanosine-3'-phosphate
  modified_base 18: mod_base = OTHER; note = 2'-O-methylguanosine-3'-phosphate
  modified_base 19: mod_base = OTHER; note = 2'-O-methyladenosine-3'-phosphate
  modified_base 20: mod_base = OTHER; note = 2'-O-methyladenosine-3'-phosphate
  modified_base 21: mod_base = OTHER; note = 2'-O-methyladenosine-3'-phosphate ((2S,4R)-1-[29-[[2-(acetylamino)-2-deoxy-beta-D-galactopyra nosyl]oxy]-14,14-bis[[3-[[3-[[5-[[2-(acetylamino)-2-deoxy-b eta-D-galactopyranosyl]oxy]-1-oxopentyl]amino]propyl]amino] -3-oxopropoxy]methyl]-1,12,19,25-tetraoxo-16-oxa-13,20,24-t riazanonacos-1-yl]-4-hydroxy-2-pyrrolidinyl)methyl ester
  misc_feature 1..8: note = RNA
  misc_feature 10: note = RNA
  misc_feature 12..21: note = RNA
  misc_feature 9: note = DNA
  misc_feature 11: note = DNA
ttgtatggtcgtgtgaggaaa

SEQ ID NO: 496 - DNA, 21 bp, synthetic construct
  source 1..21: mol_type = other DNA
  modified_base 1: mod_base = OTHER; note = 2'-O-methyluridine-3'-phosphorothioate
  modified_base 2: mod_base = OTHER; note = 2'-O-methylguanosine-3'-phosphorothioate
  modified_base 3: mod_base = OTHER; note = 2'-O-methyladenosine-3'-phosphate
  modified_base 4: mod_base = OTHER; note = 2'-O-methyladenosine-3'-phosphate
  modified_base 5: mod_base = OTHER; note = 2'-O-methylguanosine-3'-phosphate
  modified_base 6: mod_base = OTHER; note = 2'-O-methyladenosine-3'-phosphate
  modified_base 7: mod_base = OTHER; note = 2'-O-methyluridine-3'-phosphate
  modified_base 8: mod_base = OTHER; note = 2'-O-methylguanosine-3'-phosphate
  modified_base 10: mod_base = OTHER; note = 2'-O-methyluridine-3'-phosphate
  modified_base 12: mod_base = OTHER; note = 2'-O-methylcytidine-3'-phosphate
  modified_base 13: mod_base = OTHER; note = 2'-O-methyladenosine-3'-phosphate
  modified_base 14: mod_base = OTHER; note = 2'-O-methylguanosine-3'-phosphate
  modified_base 15: mod_base = OTHER; note = 2'-O-methylcytidine-3'-phosphate
  modified_base 16: mod_base = OTHER; note = 2'-O-methylguanosine-3'-phosphate
  modified_base 17: mod_base = OTHER; note = 2'-O-methylguanosine-3'-phosphate
  modified_base 18: mod_base = OTHER; note = 2'-O-methyladenosine-3'-phosphate
  modified_base 19: mod_base = OTHER; note = 2'-O-methyluridine-3'-phosphate
  modified_base 20: mod_base = OTHER; note = 2'-O-methyladenosine-3'-phosphate
  modified_base 21: mod_base = OTHER; note = 2'-O-methyluridine-3'-phosphate ((2S,4R)-1-[29-[[2-(acetylamino)-2-deoxy-beta-D-galactopyra nosyl]oxy]-14,14-bis[[3-[[3-[[5-[[2-(acetylamino)-2-deoxy-b eta-D-galactopyranosyl]oxy]-1-oxopentyl]amino]propyl]amino] -3-oxopropoxy]methyl]-1,12,19,25-tetraoxo-16-oxa-13,20,24-t riazanonacos-1-yl]-4-hydroxy-2-pyrrolidinyl)methyl ester
  misc_feature 1..8: note = RNA
  misc_feature 10: note = RNA
  misc_feature 12..21: note = RNA
  misc_feature 9: note = DNA
  misc_feature 11: note = DNA
tgaagatgctgcagcggatat

SEQ ID NO: 497 - DNA, 21 bp, synthetic construct
  source 1..21: mol_type = other DNA
  modified_base 1: mod_base = OTHER; note = 2'-O-methylcytidine-3'-phosphorothioate
  modified_base 2: mod_base = OTHER; note = 2'-O-methyluridine-3'-phosphorothioate
  modified_base 3: mod_base = OTHER; note = 2'-O-methylguanosine-3'-phosphate
  modified_base 4: mod_base = OTHER; note = 2'-O-methylcytidine-3'-phosphate
  modified_base 5: mod_base = OTHER; note = 2'-O-methyladenosine-3'-phosphate
  modified_base 6: mod_base = OTHER; note = 2'-O-methylguanosine-3'-phosphate
  modified_base 7: mod_base = OTHER; note = 2'-O-methylguanosine-3'-phosphate
  modified_base 8: mod_base = OTHER; note = 2'-O-methylguanosine-3'-phosphate
  modified_base 10: mod_base = OTHER; note = 2'-O-methyluridine-3'-phosphate
  modified_base 12: mod_base = OTHER; note = 2'-O-methyluridine-3'-phosphate
  modified_base 13: mod_base = OTHER; note = 2'-O-methylguanosine-3'-phosphate
  modified_base 14: mod_base = OTHER; note = 2'-O-methyladenosine-3'-phosphate
  modified_base 15: mod_base = OTHER; note = 2'-O-methyluridine-3'-phosphate
  modified_base 16: mod_base = OTHER; note = 2'-O-methylguanosine-3'-phosphate
  modified_base 17: mod_base = OTHER; note = 2'-O-methylguanosine-3'-phosphate
  modified_base 18: mod_base = OTHER; note = 2'-O-methylcytidine-3'-phosphate
  modified_base 19: mod_base = OTHER; note = 2'-O-methyladenosine-3'-phosphate
  modified_base 20: mod_base = OTHER; note = 2'-O-methyluridine-3'-phosphate
  modified_base 21: mod_base = OTHER; note = 2'-O-methyluridine-3'-phosphate ((2S,4R)-1-[29-[[2-(acetylamino)-2-deoxy-beta-D-galactopyra nosyl]oxy]-14,14-bis[[3-[[3-[[5-[[2-(acetylamino)-2-deoxy-b eta-D-galactopyranosyl]oxy]-1-oxopentyl]amino]propyl]amino] -3-oxopropoxy]methyl]-1,12,19,25-tetraoxo-16-oxa-13,20,24-t riazanonacos-1-yl]-4-hydroxy-2-pyrrolidinyl)methyl ester
  misc_feature 1..8: note = RNA
  misc_feature 10: note = RNA
  misc_feature 12..21: note = RNA
  misc_feature 9: note = DNA
  misc_feature 11: note = DNA
ctgcagggctttgatggcatt

SEQ ID NO: 498 - DNA, 21 bp, synthetic construct
  source 1..21: mol_type = other DNA
  modified_base 1: mod_base = OTHER; note = 2'-O-methyluridine-3'-phosphorothioate
  modified_base 2: mod_base = OTHER; note = 2'-O-methylguanosine-3'-phosphorothioate
  modified_base 3: mod_base = OTHER; note = 2'-O-methylguanosine-3'-phosphate
  modified_base 4: mod_base = OTHER; note = 2'-O-methylcytidine-3'-phosphate
  modified_base 5: mod_base = OTHER; note = 2'-O-methyluridine-3'-phosphate
  modified_base 6: mod_base = OTHER; note = 2'-O-methyladenosine-3'-phosphate
  modified_base 7: mod_base = OTHER; note = 2'-O-methylcytidine-3'-phosphate
  modified_base 8: mod_base = OTHER; note = 2'-O-methylguanosine-3'-phosphate
  modified_base 10: mod_base = OTHER; note = 2'-O-methyladenosine-3'-phosphate
  modified_base 12: mod_base = OTHER; note = 2'-O-methyladenosine-3'-phosphate
  modified_base 13: mod_base = OTHER; note = 2'-O-methylcytidine-3'-phosphate
  modified_base 14: mod_base = OTHER; note = 2'-O-methylguanosine-3'-phosphate
  modified_base 15: mod_base = OTHER; note = 2'-O-methyluridine-3'-phosphate
  modified_base 16: mod_base = OTHER; note = 2'-O-methylguanosine-3'-phosphate
  modified_base 17: mod_base = OTHER; note = 2'-O-methylguanosine-3'-phosphate
  modified_base 18: mod_base = OTHER; note = 2'-O-methyluridine-3'-phosphate
  modified_base 19: mod_base = OTHER; note = 2'-O-methylguanosine-3'-phosphate
  modified_base 20: mod_base = OTHER; note = 2'-O-methyluridine-3'-phosphate
  modified_base 21: mod_base = OTHER; note = 2'-O-methyluridine-3'-phosphate ((2S,4R)-1-[29-[[2-(acetylamino)-2-deoxy-beta-D-galactopyra nosyl]oxy]-14,14-bis[[3-[[3-[[5-[[2-(acetylamino)-2-deoxy-b eta-D-galactopyranosyl]oxy]-1-oxopentyl]amino]propyl]amino] -3-oxopropoxy]methyl]-1,12,19,25-tetraoxo-16-oxa-13,20,24-t riazanonacos-1-yl]-4-hydroxy-2-pyrrolidinyl)methyl ester
  misc_feature 1..8: note = RNA
  misc_feature 10: note = RNA
  misc_feature 12..21: note = RNA
  misc_feature 9: note = DNA
  misc_feature 11: note = DNA
tggctacggagacgtggtgtt

SEQ ID NO: 499 - DNA, 21 bp, synthetic construct
  source 1..21: mol_type = other DNA
  modified_base 1: mod_base = OTHER; note = 2'-O-methylguanosine-3'-phosphorothioate
  modified_base 2: mod_base = OTHER; note = 2'-O-methyladenosine-3'-phosphorothioate
  modified_base 3: mod_base = OTHER; note = 2'-O-methyladenosine-3'-phosphate
  modified_base 4: mod_base = OTHER; note = 2'-O-methylguanosine-3'-phosphate
  modified_base 5: mod_base = OTHER; note = 2'-O-methyladenosine-3'-phosphate
  modified_base 6: mod_base = OTHER; note = 2'-O-methyluridine-3'-phosphate
  modified_base 7: mod_base = OTHER; note = 2'-O-methylguanosine-3'-phosphate
  modified_base 8: mod_base = OTHER; note = 2'-O-methylcytidine-3'-phosphate
  modified_base 10: mod_base = OTHER; note = 2'-O-methylguanosine-3'-phosphate
  modified_base 12: mod_base = OTHER; note = 2'-O-methyladenosine-3'-phosphate
  modified_base 13: mod_base = OTHER; note = 2'-O-methylguanosine-3'-phosphate
  modified_base 14: mod_base = OTHER; note = 2'-O-methylcytidine-3'-phosphate
  modified_base 15: mod_base = OTHER; note = 2'-O-methylguanosine-3'-phosphate
  modified_base 16: mod_base = OTHER; note = 2'-O-methylguanosine-3'-phosphate
  modified_base 17: mod_base = OTHER; note = 2'-O-methyladenosine-3'-phosphate
  modified_base 18: mod_base = OTHER; note = 2'-O-methyluridine-3'-phosphate
  modified_base 19: mod_base = OTHER; note = 2'-O-methyladenosine-3'-phosphate
  modified_base 20: mod_base = OTHER; note = 2'-O-methylguanosine-3'-phosphate
  modified_base 21: mod_base = OTHER; note = 2'-O-methyladenosine-3'-phosphate ((2S,4R)-1-[29-[[2-(acetylamino)-2-deoxy-beta-D-galactopyra nosyl]oxy]-14,14-bis[[3-[[3-[[5-[[2-(acetylamino)-2-deoxy-b eta-D-galactopyranosyl]oxy]-1-oxopentyl]amino]propyl]amino] -3-oxopropoxy]methyl]-1,12,19,25-tetraoxo-16-oxa-13,20,24-t riazanonacos-1-yl]-4-hydroxy-2-pyrrolidinyl)methyl ester
  misc_feature 1..8: note = RNA
  misc_feature 10: note = RNA
  misc_feature 12..21: note = RNA
  misc_feature 9: note = DNA
  misc_feature 11: note = DNA
gaagatgctgcagcggataga

SEQ ID NO: 500 - DNA, 21 bp, synthetic construct
  source 1..21: mol_type = other DNA
  modified_base 1: mod_base = OTHER; note = 2'-O-methyladenosine-3'-phosphorothioate
  modified_base 2: mod_base = OTHER; note = 2'-O-methylguanosine-3'-phosphorothioate
  modified_base 3: mod_base = OTHER; note = 2'-O-methylcytidine-3'-phosphate
  modified_base 4: mod_base = OTHER; note = 2'-O-methyluridine-3'-phosphate
  modified_base 5: mod_base = OTHER; note = 2'-O-methylguanosine-3'-phosphate
  modified_base 6: mod_base = OTHER; note = 2'-O-methylguanosine-3'-phosphate
  modified_base 7: mod_base = OTHER; note = 2'-O-methyladenosine-3'-phosphate
  modified_base 8: mod_base = OTHER; note = 2'-O-methylguanosine-3'-phosphate
  modified_base 10: mod_base = OTHER; note = 2'-O-methylcytidine-3'-phosphate
  modified_base 12: mod_base = OTHER; note = 2'-O-methylcytidine-3'-phosphate
  modified_base 13: mod_base = OTHER; note = 2'-O-methylcytidine-3'-phosphate
  modified_base 14: mod_base = OTHER; note = 2'-O-methyluridine-3'-phosphate
  modified_base 15: mod_base = OTHER; note = 2'-O-methyluridine-3'-phosphate
  modified_base 16: mod_base = OTHER; note = 2'-O-methylcytidine-3'-phosphate
  modified_base 17: mod_base = OTHER; note = 2'-O-methyladenosine-3'-phosphate
  modified_base 18: mod_base = OTHER; note = 2'-O-methyladenosine-3'-phosphate
  modified_base 19: mod_base = OTHER; note = 2'-O-methyluridine-3'-phosphate
  modified_base 20: mod_base = OTHER; note = 2'-O-methylguanosine-3'-phosphate
  modified_base 21: mod_base = OTHER; note = 2'-O-methyluridine-3'-phosphate ((2S,4R)-1-[29-[[2-(acetylamino)-2-deoxy-beta-D-galactopyra nosyl]oxy]-14,14-bis[[3-[[3-[[5-[[2-(acetylamino)-2-deoxy-b eta-D-galactopyranosyl]oxy]-1-oxopentyl]amino]propyl]amino] -3-oxopropoxy]methyl]-1,12,19,25-tetraoxo-16-oxa-13,20,24-t riazanonacos-1-yl]-4-hydroxy-2-pyrrolidinyl)methyl ester
  misc_feature 1..8: note = RNA
  misc_feature 10: note = RNA
  misc_feature 12..21: note = RNA
  misc_feature 9: note = DNA
  misc_feature 11: note = DNA
agctggagacaccttcaatgt

SEQ ID NO: 501 - DNA, 21 bp, synthetic construct
  source 1..21: mol_type = other DNA
  modified_base 1: mod_base = OTHER; note = 2'-O-methyluridine-3'-phosphorothioate
  modified_base 2: mod_base = OTHER; note = 2'-O-methylguanosine-3'-phosphorothioate
  modified_base 3: mod_base = OTHER; note = 2'-O-methyluridine-3'-phosphate
  modified_base 4: mod_base = OTHER; note = 2'-O-methyluridine-3'-phosphate
  modified_base 5: mod_base = OTHER; note = 2'-O-methyluridine-3'-phosphate
  modified_base 6: mod_base = OTHER; note = 2'-O-methylguanosine-3'-phosphate
  modified_base 7: mod_base = OTHER; note = 2'-O-methylguanosine-3'-phosphate
  modified_base 8: mod_base = OTHER; note = 2'-O-methylcytidine-3'-phosphate
  modified_base 10: mod_base = OTHER; note = 2'-O-methyladenosine-3'-phosphate
  modified_base 12: mod_base = OTHER; note = 2'-O-methylguanosine-3'-phosphate
  modified_base 13: mod_base = OTHER; note = 2'-O-methylguanosine-3'-phosphate
  modified_base 14: mod_base = OTHER; note = 2'-O-methyladenosine-3'-phosphate
  modified_base 15: mod_base = OTHER; note = 2'-O-methylguanosine-3'-phosphate
  modified_base 16: mod_base = OTHER; note = 2'-O-methyladenosine-3'-phosphate
  modified_base 17: mod_base = OTHER; note = 2'-O-methylcytidine-3'-phosphate
  modified_base 18: mod_base = OTHER; note = 2'-O-methylguanosine-3'-phosphate
  modified_base 19: mod_base = OTHER; note = 2'-O-methyluridine-3'-phosphate
  modified_base 20: mod_base = OTHER; note = 2'-O-methylguanosine-3'-phosphate
  modified_base 21: mod_base = OTHER; note = 2'-O-methyluridine-3'-phosphate ((2S,4R)-1-[29-[[2-(acetylamino)-2-deoxy-beta-D-galactopyra nosyl]oxy]-14,14-bis[[3-[[3-[[5-[[2-(acetylamino)-2-deoxy-b eta-D-galactopyranosyl]oxy]-1-oxopentyl]amino]propyl]amino] -3-oxopropoxy]methyl]-1,12,19,25-tetraoxo-16-oxa-13,20,24-t riazanonacos-1-yl]-4-hydroxy-2-pyrrolidinyl)methyl ester
  misc_feature 1..8: note = RNA
  misc_feature 10: note = RNA
  misc_feature 12..21: note = RNA
  misc_feature 9: note = DNA
  misc_feature 11: note = DNA
tgtttggctacggagacgtgt

SEQ ID NO: 502 - DNA, 21 bp, synthetic construct
  source 1..21: mol_type = other DNA
  modified_base 1: mod_base = OTHER; note = 2'-O-methyluridine-3'-phosphorothioate
  modified_base 2: mod_base = OTHER; note = 2'-O-methylguanosine-3'-phosphorothioate
  modified_base 3: mod_base = OTHER; note = 2'-O-methylcytidine-3'-phosphate
  modified_base 4: mod_base = OTHER; note = 2'-O-methyladenosine-3'-phosphate
  modified_base 5: mod_base = OTHER; note = 2'-O-methyluridine-3'-phosphate
  modified_base 6: mod_base = OTHER; note = 2'-O-methyluridine-3'-phosphate
  modified_base 7: mod_base = OTHER; note = 2'-O-methylcytidine-3'-phosphate
  modified_base 8: mod_base = OTHER; note = 2'-O-methyluridine-3'-phosphate
  modified_base 10: mod_base = OTHER; note = 2'-O-methylguanosine-3'-phosphate
  modified_base 12: mod_base = OTHER; note = 2'-O-methylguanosine-3'-phosphate
  modified_base 13: mod_base = OTHER; note = 2'-O-methyladenosine-3'-phosphate
  modified_base 14: mod_base = OTHER; note = 2'-O-methyluridine-3'-phosphate
  modified_base 15: mod_base = OTHER; note = 2'-O-methylcytidine-3'-phosphate
  modified_base 16: mod_base = OTHER; note = 2'-O-methylguanosine-3'-phosphate
  modified_base 17: mod_base = OTHER; note = 2'-O-methylcytidine-3'-phosphate
  modified_base 18: mod_base = OTHER; note = 2'-O-methyluridine-3'-phosphate
  modified_base 19: mod_base = OTHER; note = 2'-O-methyluridine-3'-phosphate
  modified_base 20: mod_base = OTHER; note = 2'-O-methyladenosine-3'-phosphate
  modified_base 21: mod_base = OTHER; note = 2'-O-methyluridine-3'-phosphate ((2S,4R)-1-[29-[[2-(acetylamino)-2-deoxy-beta-D-galactopyra nosyl]oxy]-14,14-bis[[3-[[3-[[5-[[2-(acetylamino)-2-deoxy-b eta-D-galactopyranosyl]oxy]-1-oxopentyl]amino]propyl]amino] -3-oxopropoxy]methyl]-1,12,19,25-tetraoxo-16-oxa-13,20,24-t riazanonacos-1-yl]-4-hydroxy-2-pyrrolidinyl)methyl ester
  misc_feature 1..8: note = RNA
  misc_feature 10: note = RNA
  misc_feature 12..21: note = RNA
  misc_feature 9: note = DNA
  misc_feature 11: note = DNA
tgcattctcgagatcgcttat

SEQ ID NO: 503 - DNA, 21 bp, synthetic construct
  source 1..21: mol_type = other DNA
  modified_base 1: mod_base = OTHER; note = 2'-O-methylguanosine-3'-phosphorothioate
  modified_base 2: mod_base = OTHER; note = 2'-O-methyladenosine-3'-phosphorothioate
  modified_base 3: mod_base = OTHER; note = 2'-O-methyluridine-3'-phosphate
  modified_base 4: mod_base = OTHER; note = 2'-O-methylcytidine-3'-phosphate
  modified_base 5: mod_base = OTHER; note = 2'-O-methylguanosine-3'-phosphate
  modified_base 6: mod_base = OTHER; note = 2'-O-methylcytidine-3'-phosphate
  modified_base 7: mod_base = OTHER; note = 2'-O-methyluridine-3'-phosphate
  modified_base 8: mod_base = OTHER; note = 2'-O-methyluridine-3'-phosphate
  modified_base 10: mod_base = OTHER; note = 2'-O-methylguanosine-3'-phosphate
  modified_base 12: mod_base = OTHER; note = 2'-O-methylcytidine-3'-phosphate
  modified_base 13: mod_base = OTHER; note = 2'-O-methylguanosine-3'-phosphate
  modified_base 14: mod_base = OTHER; note = 2'-O-methylcytidine-3'-phosphate
  modified_base 15: mod_base = OTHER; note = 2'-O-methylguanosine-3'-phosphate
  modified_base 16: mod_base = OTHER; note = 2'-O-methylcytidine-3'-phosphate
  modified_base 17: mod_base = OTHER; note = 2'-O-methyluridine-3'-phosphate
  modified_base 18: mod_base = OTHER; note = 2'-O-methyluridine-3'-phosphate
  modified_base 19: mod_base = OTHER; note = 2'-O-methyluridine-3'-phosphate
  modified_base 20: mod_base = OTHER; note = 2'-O-methyladenosine-3'-phosphate
  modified_base 21: mod_base = OTHER; note = 2'-O-methyladenosine-3'-phosphate ((2S,4R)-1-[29-[[2-(acetylamino)-2-deoxy-beta-D-galactopyra nosyl]oxy]-14,14-bis[[3-[[3-[[5-[[2-(acetylamino)-2-deoxy-b eta-D-galactopyranosyl]oxy]-1-oxopentyl]amino]propyl]amino] -3-oxopropoxy]methyl]-1,12,19,25-tetraoxo-16-oxa-13,20,24-t riazanonacos-1-yl]-4-hydroxy-2-pyrrolidinyl)methyl ester
  misc_feature 1..8: note = RNA
  misc_feature 10: note = RNA
  misc_feature 12..21: note = RNA
  misc_feature 9: note = DNA
  misc_feature 11: note = DNA
gatcgcttagccgcgctttaa

SEQ ID NO: 504 - DNA, 21 bp, synthetic construct
  source 1..21: mol_type = other DNA
  modified_base 1: mod_base = OTHER; note = 2'-O-methylguanosine-3'-phosphorothioate
  modified_base 2: mod_base = OTHER; note = 2'-O-methylcytidine-3'-phosphorothioate
  modified_base 3: mod_base = OTHER; note = 2'-O-methylcytidine-3'-phosphate
  modified_base 4: mod_base = OTHER; note = 2'-O-methylcytidine-3'-phosphate
  modified_base 5: mod_base = OTHER; note = 2'-O-methyladenosine-3'-phosphate
  modified_base 6: mod_base = OTHER; note = 2'-O-methylcytidine-3'-phosphate
  modified_base 7: mod_base = OTHER; note = 2'-O-methylcytidine-3'-phosphate
  modified_base 8: mod_base = OTHER; note = 2'-O-methyladenosine-3'-phosphate
  modified_base 10: mod_base = OTHER; note = 2'-O-methylcytidine-3'-phosphate
  modified_base 12: mod_base = OTHER; note = 2'-O-methyluridine-3'-phosphate
  modified_base 13: mod_base = OTHER; note = 2'-O-methylguanosine-3'-phosphate
  modified_base 14: mod_base = OTHER; note = 2'-O-methyluridine-3'-phosphate
  modified_base 15: mod_base = OTHER; note = 2'-O-methylguanosine-3'-phosphate
  modified_base 16: mod_base = OTHER; note = 2'-O-methyladenosine-3'-phosphate
  modified_base 17: mod_base = OTHER; note = 2'-O-methyluridine-3'-phosphate
  modified_base 18: mod_base = OTHER; note = 2'-O-methyluridine-3'-phosphate
  modified_base 19: mod_base = OTHER; note = 2'-O-methyluridine-3'-phosphate
  modified_base 20: mod_base = OTHER; note = 2'-O-methylguanosine-3'-phosphate
  modified_base 21: mod_base = OTHER; note = 2'-O-methyladenosine-3'-phosphate ((2S,4R)-1-[29-[[2-(acetylamino)-2-deoxy-beta-D-galactopyra nosyl]oxy]-14,14-bis[[3-[[3-[[5-[[2-(acetylamino)-2-deoxy-b eta-D-galactopyranosyl]oxy]-1-oxopentyl]amino]propyl]amino] -3-oxopropoxy]methyl]-1,12,19,25-tetraoxo-16-oxa-13,20,24-t riazanonacos-1-yl]-4-hydroxy-2-pyrrolidinyl)methyl ester
  misc_feature 1..8: note = RNA
  misc_feature 10: note = RNA
  misc_feature 12..21: note = RNA
  misc_feature 9: note = DNA
  misc_feature 11: note = DNA
gcccaccagcctgtgatttga

SEQ ID NO: 505 - DNA, 21 bp, synthetic construct
  source 1..21: mol_type = other DNA
  modified_base 1: mod_base = OTHER; note = 2'-O-methyladenosine-3'-phosphorothioate
  modified_base 2: mod_base = OTHER; note = 2'-O-methylguanosine-3'-phosphorothioate
  modified_base 3: mod_base = OTHER; note = 2'-O-methyladenosine-3'-phosphate
  modified_base 4: mod_base = OTHER; note = 2'-O-methylcytidine-3'-phosphate
  modified_base 5: mod_base = OTHER; note = 2'-O-methylguanosine-3'-phosphate
  modified_base 6: mod_base = OTHER; note = 2'-O-methyluridine-3'-phosphate
  modified_base 7: mod_base = OTHER; note = 2'-O-methylguanosine-3'-phosphate
  modified_base 8: mod_base = OTHER; note = 2'-O-methylguanosine-3'-phosphate
  modified_base 10: mod_base = OTHER; note = 2'-O-methylguanosine-3'-phosphate
  modified_base 12: mod_base = OTHER; note = 2'-O-methyluridine-3'-phosphate
  modified_base 13: mod_base = OTHER; note = 2'-O-methyluridine-3'-phosphate
  modified_base 14: mod_base = OTHER; note = 2'-O-methylguanosine-3'-phosphate
  modified_base 15: mod_base = OTHER; note = 2'-O-methyluridine-3'-phosphate
  modified_base 16: mod_base = OTHER; note = 2'-O-methylcytidine-3'-phosphate
  modified_base 17: mod_base = OTHER; note = 2'-O-methyladenosine-3'-phosphate
  modified_base 18: mod_base = OTHER; note = 2'-O-methylguanosine-3'-phosphate
  modified_base 19: mod_base = OTHER; note = 2'-O-methylcytidine-3'-phosphate
  modified_base 20: mod_base = OTHER; note = 2'-O-methyladenosine-3'-phosphate
  modified_base 21: mod_base = OTHER; note = 2'-O-methyladenosine-3'-phosphate ((2S,4R)-1-[29-[[2-(acetylamino)-2-deoxy-beta-D-galactopyra nosyl]oxy]-14,14-bis[[3-[[3-[[5-[[2-(acetylamino)-2-deoxy-b eta-D-galactopyranosyl]oxy]-1-oxopentyl]amino]propyl]amino] -3-oxopropoxy]methyl]-1,12,19,25-tetraoxo-16-oxa-13,20,24-t riazanonacos-1-yl]-4-hydroxy-2-pyrrolidinyl)methyl ester
  misc_feature 1..8: note = RNA
  misc_feature 10: note = RNA
  misc_feature 12..21: note = RNA
  misc_feature 9: note = DNA
  misc_feature 11: note = DNA
agacgtggtgtttgtcagcaa

SEQ ID NO: 506 - DNA, 21 bp, synthetic construct
  source 1..21: mol_type = other DNA
  modified_base 1: mod_base = OTHER; note = 2'-O-methyladenosine-3'-phosphorothioate
  modified_base 2: mod_base = OTHER; note = 2'-O-methylguanosine-3'-phosphorothioate
  modified_base 3: mod_base = OTHER; note = 2'-O-methyladenosine-3'-phosphate
  modified_base 4: mod_base = OTHER; note = 2'-O-methyluridine-3'-phosphate
  modified_base 5: mod_base = OTHER; note = 2'-O-methylguanosine-3'-phosphate
  modified_base 6: mod_base = OTHER; note = 2'-O-methylcytidine-3'-phosphate
  modified_base 7: mod_base = OTHER; note = 2'-O-methyluridine-3'-phosphate
  modified_base 8: mod_base = OTHER; note = 2'-O-methylguanosine-3'-phosphate
  modified_base 10: mod_base = OTHER; note = 2'-O-methyladenosine-3'-phosphate
  modified_base 12: mod_base = OTHER; note = 2'-O-methylcytidine-3'-phosphate
  modified_base 13: mod_base = OTHER; note = 2'-O-methylguanosine-3'-phosphate
  modified_base 14: mod_base = OTHER; note = 2'-O-methylguanosine-3'-phosphate
  modified_base 15: mod_base = OTHER; note = 2'-O-methyladenosine-3'-phosphate
  modified_base 16: mod_base = OTHER; note = 2'-O-methyluridine-3'-phosphate
  modified_base 17: mod_base = OTHER; note = 2'-O-methyladenosine-3'-phosphate
  modified_base 18: mod_base = OTHER; note = 2'-O-methylguanosine-3'-phosphate
  modified_base 19: mod_base = OTHER; note = 2'-O-methyladenosine-3'-phosphate
  modified_base 20: mod_base = OTHER; note = 2'-O-methylcytidine-3'-phosphate
  modified_base 21: mod_base = OTHER; note = 2'-O-methyluridine-3'-phosphate ((2S,4R)-1-[29-[[2-(acetylamino)-2-deoxy-beta-D-galactopyra nosyl]oxy]-14,14-bis[[3-[[3-[[5-[[2-(acetylamino)-2-deoxy-b eta-D-galactopyranosyl]oxy]-1-oxopentyl]amino]propyl]amino] -3-oxopropoxy]methyl]-1,12,19,25-tetraoxo-16-oxa-13,20,24-t riazanonacos-1-yl]-4-hydroxy-2-pyrrolidinyl)methyl ester
  misc_feature 1..8: note = RNA
  misc_feature 10: note = RNA
  misc_feature 12..21: note = RNA
  misc_feature 9: note = DNA
  misc_feature 11: note = DNA
agatgctgcagcggatagact

SEQ ID NO: 507 - DNA, 21 bp, synthetic construct
  source 1..21: mol_type = other DNA
  modified_base 1: mod_base = OTHER; note = 2'-O-methyladenosine-3'-phosphorothioate
  modified_base 2: mod_base = OTHER; note = 2'-O-methylguanosine-3'-phosphorothioate
  modified_base 3: mod_base = OTHER; note = 2'-O-methyladenosine-3'-phosphate
  modified_base 4: mod_base = OTHER; note = 2'-O-methyladenosine-3'-phosphate
  modified_base 5: mod_base = OTHER; note = 2'-O-methylguanosine-3'-phosphate
  modified_base 6: mod_base = OTHER; note = 2'-O-methylcytidine-3'-phosphate
  modified_base 7: mod_base = OTHER; note = 2'-O-methyladenosine-3'-phosphate
  modified_base 8: mod_base = OTHER; note = 2'-O-methylguanosine-3'-phosphate
  modified_base 10: mod_base = OTHER; note = 2'-O-methyluridine-3'-phosphate
  modified_base 12: mod_base = OTHER; note = 2'-O-methylcytidine-3'-phosphate
  modified_base 13: mod_base = OTHER; note = 2'-O-methyluridine-3'-phosphate
  modified_base 14: mod_base = OTHER; note = 2'-O-methylguanosine-3'-phosphate
  modified_base 15: mod_base = OTHER; note = 2'-O-methyluridine-3'-phosphate
  modified_base 16: mod_base = OTHER; note = 2'-O-methylguanosine-3'-phosphate
  modified_base 17: mod_base = OTHER; note = 2'-O-methylcytidine-3'-phosphate
  modified_base 18: mod_base = OTHER; note = 2'-O-methylguanosine-3'-phosphate
  modified_base 19: mod_base = OTHER; note = 2'-O-methyluridine-3'-phosphate
  modified_base 20: mod_base = OTHER; note = 2'-O-methylguanosine-3'-phosphate
  modified_base 21: mod_base = OTHER; note = 2'-O-methyluridine-3'-phosphate ((2S,4R)-1-[29-[[2-(acetylamino)-2-deoxy-beta-D-galactopyra nosyl]oxy]-14,14-bis[[3-[[3-[[5-[[2-(acetylamino)-2-deoxy-b eta-D-galactopyranosyl]oxy]-1-oxopentyl]amino]propyl]amino] -3-oxopropoxy]methyl]-1,12,19,25-tetraoxo-16-oxa-13,20,24-t riazanonacos-1-yl]-4-hydroxy-2-pyrrolidinyl)methyl ester
  misc_feature 1..8: note = RNA
  misc_feature 10: note = RNA
  misc_feature 12..21: note = RNA
  misc_feature 9: note = DNA
  misc_feature 11: note = DNA
agaagcagatcctgtgcgtgt

SEQ ID NO: 508 - DNA, 21 bp, synthetic construct
  source 1..21: mol_type = other DNA
  modified_base 1: mod_base = OTHER; note = 2'-O-methylguanosine-3'-phosphorothioate
  modified_base 2: mod_base = OTHER; note = 2'-O-methylcytidine-3'-phosphorothioate
  modified_base 3: mod_base = OTHER; note = 2'-O-methyluridine-3'-phosphate
  modified_base 4: mod_base = OTHER; note = 2'-O-methyluridine-3'-phosphate
  modified_base 5: mod_base = OTHER; note = 2'-O-methylguanosine-3'-phosphate
  modified_base 6: mod_base = OTHER; note = 2'-O-methyluridine-3'-phosphate
  modified_base 7: mod_base = OTHER; note = 2'-O-methyladenosine-3'-phosphate
  modified_base 8: mod_base = OTHER; note = 2'-O-methyluridine-3'-phosphate
  modified_base 10: mod_base = OTHER; note = 2'-O-methylguanosine-3'-phosphate
  modified_base 12: mod_base = OTHER; note = 2'-O-methylcytidine-3'-phosphate
  modified_base 13: mod_base = OTHER; note = 2'-O-methylguanosine-3'-phosphate
  modified_base 14: mod_base = OTHER; note = 2'-O-methyluridine-3'-phosphate
  modified_base 15: mod_base = OTHER; note = 2'-O-methylguanosine-3'-phosphate
  modified_base 16: mod_base = OTHER; note = 2'-O-methyluridine-3'-phosphate
  modified_base 17: mod_base = OTHER; note = 2'-O-methylguanosine-3'-phosphate
  modified_base 18: mod_base = OTHER; note = 2'-O-methyladenosine-3'-phosphate
  modified_base 19: mod_base = OTHER; note = 2'-O-methylguanosine-3'-phosphate
  modified_base 20: mod_base = OTHER; note = 2'-O-methylguanosine-3'-phosphate
  modified_base 21: mod_base = OTHER; note = 2'-O-methyladenosine-3'-phosphate ((2S,4R)-1-[29-[[2-(acetylamino)-2-deoxy-beta-D-galactopyra nosyl]oxy]-14,14-bis[[3-[[3-[[5-[[2-(acetylamino)-2-deoxy-b eta-D-galactopyranosyl]oxy]-1-oxopentyl]amino]propyl]amino] -3-oxopropoxy]methyl]-1,12,19,25-tetraoxo-16-oxa-13,20,24-t riazanonacos-1-yl]-4-hydroxy-2-pyrrolidinyl)methyl ester
  misc_feature 1..8: note = RNA
  misc_feature 10: note = RNA
  misc_feature 12..21: note = RNA
  misc_feature 9: note = DNA
  misc_feature 11: note = DNA
gcttgtatggtcgtgtgagga

SEQ ID NO: 509 - DNA, 21 bp, synthetic construct
  source 1..21: mol_type = other DNA
  modified_base 1: mod_base = OTHER; note = 2'-O-methyluridine-3'-phosphorothioate
  modified_base 2: mod_base = OTHER; note = 2'-O-methyluridine-3'-phosphorothioate
  modified_base 3: mod_base = OTHER; note = 2'-O-methylcytidine-3'-phosphate
  modified_base 4: mod_base = OTHER; note = 2'-O-methyluridine-3'-phosphate
  modified_base 5: mod_base = OTHER; note = 2'-O-methylcytidine-3'-phosphate
  modified_base 6: mod_base = OTHER; note = 2'-O-methylguanosine-3'-phosphate
  modified_base 7: mod_base = OTHER; note = 2'-O-methyladenosine-3'-phosphate
  modified_base 8: mod_base = OTHER; note = 2'-O-methylguanosine-3'-phosphate
  modified_base 10: mod_base = OTHER; note = 2'-O-methyluridine-3'-phosphate
  modified_base 12: mod_base = OTHER; note = 2'-O-methylguanosine-3'-phosphate
  modified_base 13: mod_base = OTHER; note = 2'-O-methylcytidine-3'-phosphate
  modified_base 14: mod_base = OTHER; note = 2'-O-methyluridine-3'-phosphate
  modified_base 15: mod_base = OTHER; note = 2'-O-methyluridine-3'-phosphate
  modified_base 16: mod_base = OTHER; note = 2'-O-methyladenosine-3'-phosphate
  modified_base 17: mod_base = OTHER; note = 2'-O-methylguanosine-3'-phosphate
  modified_base 18: mod_base = OTHER; note = 2'-O-methylcytidine-3'-phosphate
  modified_base 19: mod_base = OTHER; note = 2'-O-methylcytidine-3'-phosphate
  modified_base 20: mod_base = OTHER; note = 2'-O-methylguanosine-3'-phosphate
  modified_base 21: mod_base = OTHER; note = 2'-O-methyluridine-3'-phosphate ((2S,4R)-1-[29-[[2-(acetylamino)-2-deoxy-beta-D-galactopyra nosyl]oxy]-14,14-bis[[3-[[3-[[5-[[2-(acetylamino)-2-deoxy-b eta-D-galactopyranosyl]oxy]-1-oxopentyl]amino]propyl]amino] -3-oxopropoxy]methyl]-1,12,19,25-tetraoxo-16-oxa-13,20,24-t riazanonacos-1-yl]-4-hydroxy-2-pyrrolidinyl)methyl ester
  misc_feature 1..8: note = RNA
  misc_feature 10: note = RNA
  misc_feature 12..21: note = RNA
  misc_feature 9: note = DNA
  misc_feature 11: note = DNA
ttctcgagatcgcttagccgt

SEQ ID NO: 510 - DNA, 21 bp, synthetic construct
  source 1..21: mol_type = other DNA
  modified_base 1: mod_base = OTHER; note = 2'-O-methyluridine-3'-phosphorothioate
  modified_base 2: mod_base = OTHER; note = 2'-O-methylguanosine-3'-phosphorothioate
  modified_base 3: mod_base = OTHER; note = 2'-O-methyladenosine-3'-phosphate
  modified_base 4: mod_base = OTHER; note = 2'-O-methylguanosine-3'-phosphate
  modified_base 5: mod_base = OTHER; note = 2'-O-methyladenosine-3'-phosphate
  modified_base 6: mod_base = OTHER; note = 2'-O-methyladenosine-3'-phosphate
  modified_base 7: mod_base = OTHER; note = 2'-O-methylguanosine-3'-phosphate
  modified_base 8: mod_base = OTHER; note = 2'-O-methylguanosine-3'-phosphate
  modified_base 10: mod_base = OTHER; note = 2'-O-methyluridine-3'-phosphate
  modified_base 12: mod_base = OTHER; note = 2'-O-methyladenosine-3'-phosphate
  modified_base 13: mod_base = OTHER; note = 2'-O-methyluridine-3'-phosphate
  modified_base 14: mod_base = OTHER; note = 2'-O-methylcytidine-3'-phosphate
  modified_base 15: mod_base = OTHER; note = 2'-O-methyluridine-3'-phosphate
  modified_base 16: mod_base = OTHER; note = 2'-O-methylguanosine-3'-phosphate
  modified_base 17: mod_base = OTHER; note = 2'-O-methyladenosine-3'-phosphate
  modified_base 18: mod_base = OTHER; note = 2'-O-methylcytidine-3'-phosphate
  modified_base 19: mod_base = OTHER; note = 2'-O-methylcytidine-3'-phosphate
  modified_base 20: mod_base = OTHER; note = 2'-O-methylcytidine-3'-phosphate
  modified_base 21: mod_base = OTHER; note = 2'-O-methyladenosine-3'-phosphate ((2S,4R)-1-[29-[[2-(acetylamino)-2-deoxy-beta-D-galactopyra nosyl]oxy]-14,14-bis[[3-[[3-[[5-[[2-(acetylamino)-2-deoxy-b eta-D-galactopyranosyl]oxy]-1-oxopentyl]amino]propyl]amino] -3-oxopropoxy]methyl]-1,12,19,25-tetraoxo-16-oxa-13,20,24-t riazanonacos-1-yl]-4-hydroxy-2-pyrrolidinyl)methyl ester
  misc_feature 1..8: note = RNA
  misc_feature 10: note = RNA
  misc_feature 12..21: note = RNA
  misc_feature 9: note = DNA
  misc_feature 11: note = DNA
tgagaaggttgatctgaccca

SEQ ID NO: 511 - DNA, 21 bp, synthetic construct
  source 1..21: mol_type = other DNA
  modified_base 1: mod_base = OTHER; note = 2'-O-methyluridine-3'-phosphorothioate
  modified_base 2: mod_base = OTHER; note = 2'-O-methyluridine-3'-phosphorothioate
  modified_base 3: mod_base = OTHER; note = 2'-O-methylguanosine-3'-phosphate
  modified_base 4: mod_base = OTHER; note = 2'-O-methylcytidine-3'-phosphate
  modified_base 5: mod_base = OTHER; note = 2'-O-methyladenosine-3'-phosphate
  modified_base 6: mod_base = OTHER; note = 2'-O-methyluridine-3'-phosphate
  modified_base 7: mod_base = OTHER; note = 2'-O-methyluridine-3'-phosphate
  modified_base 8: mod_base = OTHER; note = 2'-O-methylcytidine-3'-phosphate
  modified_base 10: mod_base = OTHER; note = 2'-O-methylcytidine-3'-phosphate
  modified_base 12: mod_base = OTHER; note = 2'-O-methyladenosine-3'-phosphate
  modified_base 13: mod_base = OTHER; note = 2'-O-methylguanosine-3'-phosphate
  modified_base 14: mod_base = OTHER; note = 2'-O-methyladenosine-3'-phosphate
  modified_base 15: mod_base = OTHER; note = 2'-O-methyluridine-3'-phosphate
  modified_base 16: mod_base = OTHER; note = 2'-O-methylcytidine-3'-phosphate
  modified_base 17: mod_base = OTHER; note = 2'-O-methylguanosine-3'-phosphate
  modified_base 18: mod_base = OTHER; note = 2'-O-methylcytidine-3'-phosphate
  modified_base 19: mod_base = OTHER; note = 2'-O-methyluridine-3'-phosphate
  modified_base 20: mod_base = OTHER; note = 2'-O-methyluridine-3'-phosphate
  modified_base 21: mod_base = OTHER; note = 2'-O-methyladenosine-3'-phosphate ((2S,4R)-1-[29-[[2-(acetylamino)-2-deoxy-beta-D-galactopyra nosyl]oxy]-14,14-bis[[3-[[3-[[5-[[2-(acetylamino)-2-deoxy-b eta-D-galactopyranosyl]oxy]-1-oxopentyl]amino]propyl]amino] -3-oxopropoxy]methyl]-1,12,19,25-tetraoxo-16-oxa-13,20,24-t riazanonacos-1-yl]-4-hydroxy-2-pyrrolidinyl)methyl ester
  misc_feature 1..8: note = RNA
  misc_feature 10: note = RNA
  misc_feature 12..21: note = RNA
  misc_feature 9: note = DNA
  misc_feature 11: note = DNA
ttgcattctcgagatcgctta

SEQ ID NO: 512 - DNA, 21 bp, synthetic construct
  source 1..21: mol_type = other DNA
  modified_base 1: mod_base = OTHER; note = 2'-O-methyluridine-3'-phosphorothioate
  modified_base 2: mod_base = OTHER; note = 2'-O-methylguanosine-3'-phosphorothioate
  modified_base 3: mod_base = OTHER; note = 2'-O-methylcytidine-3'-phosphate
  modified_base 4: mod_base = OTHER; note = 2'-O-methylguanosine-3'-phosphate
  modified_base 5: mod_base = OTHER; note = 2'-O-methyluridine-3'-phosphate
  modified_base 6: mod_base = OTHER; note = 2'-O-methyluridine-3'-phosphate
  modified_base 7: mod_base = OTHER; note = 2'-O-methylguanosine-3'-phosphate
  modified_base 8: mod_base = OTHER; note = 2'-O-methyluridine-3'-phosphate
  modified_base 10: mod_base = OTHER; note = 2'-O-methylcytidine-3'-phosphate
  modified_base 12: mod_base = OTHER; note = 2'-O-methylguanosine-3'-phosphate
  modified_base 13: mod_base = OTHER; note = 2'-O-methyladenosine-3'-phosphate
  modified_base 14: mod_base = OTHER; note = 2'-O-methylcytidine-3'-phosphate
  modified_base 15: mod_base = OTHER; note = 2'-O-methyluridine-3'-phosphate
  modified_base 16: mod_base = OTHER; note = 2'-O-methylcytidine-3'-phosphate
  modified_base 17: mod_base = OTHER; note = 2'-O-methyluridine-3'-phosphate
  modified_base 18: mod_base = OTHER; note = 2'-O-methyladenosine-3'-phosphate
  modified_base 19: mod_base = OTHER; note = 2'-O-methyluridine-3'-phosphate
  modified_base 20: mod_base = OTHER; note = 2'-O-methyluridine-3'-phosphate
  modified_base 21: mod_base = OTHER; note = 2'-O-methyluridine-3'-phosphate ((2S,4R)-1-[29-[[2-(acetylamino)-2-deoxy-beta-D-galactopyra nosyl]oxy]-14,14-bis[[3-[[3-[[5-[[2-(acetylamino)-2-deoxy-b eta-D-galactopyranosyl]oxy]-1-oxopentyl]amino]propyl]amino] -3-oxopropoxy]methyl]-1,12,19,25-tetraoxo-16-oxa-13,20,24-t riazanonacos-1-yl]-4-hydroxy-2-pyrrolidinyl)methyl ester
  misc_feature 1..8: note = RNA
  misc_feature 10: note = RNA
  misc_feature 12..21: note = RNA
  misc_feature 9: note = DNA
  misc_feature 11: note = DNA
tgcgttgtgcagactctattt

SEQ ID NO: 513 - DNA, 21 bp, synthetic construct
  source 1..21: mol_type = other DNA
  modified_base 1: mod_base = OTHER; note = 2'-O-methyluridine-3'-phosphorothioate
  modified_base 2: mod_base = OTHER; note = 2'-O-methylcytidine-3'-phosphorothioate
  modified_base 3: mod_base = OTHER; note = 2'-O-methylcytidine-3'-phosphate
  modified_base 4: mod_base = OTHER; note = 2'-O-methyladenosine-3'-phosphate
  modified_base 5: mod_base = OTHER; note = 2'-O-methyladenosine-3'-phosphate
  modified_base 6: mod_base = OTHER; note = 2'-O-methylcytidine-3'-phosphate
  modified_base 7: mod_base = OTHER; note = 2'-O-methyluridine-3'-phosphate
  modified_base 8: mod_base = OTHER; note = 2'-O-methylcytidine-3'-phosphate
  modified_base 10: mod_base = OTHER; note = 2'-O-methyluridine-3'-phosphate
  modified_base 12: mod_base = OTHER; note = 2'-O-methylcytidine-3'-phosphate
  modified_base 13: mod_base = OTHER; note = 2'-O-methyladenosine-3'-phosphate
  modified_base 14: mod_base = OTHER; note = 2'-O-methylcytidine-3'-phosphate
  modified_base 15: mod_base = OTHER; note = 2'-O-methylcytidine-3'-phosphate
  modified_base 16: mod_base = OTHER; note = 2'-O-methylguanosine-3'-phosphate
  modified_base 17: mod_base = OTHER; note = 2'-O-methyluridine-3'-phosphate
  modified_base 18: mod_base = OTHER; note = 2'-O-methyluridine-3'-phosphate
  modified_base 19: mod_base = OTHER; note = 2'-O-methylcytidine-3'-phosphate
  modified_base 20: mod_base = OTHER; note = 2'-O-methyluridine-3'-phosphate
  modified_base 21: mod_base = OTHER; note = 2'-O-methyluridine-3'-phosphate ((2S,4R)-1-[29-[[2-(acetylamino)-2-deoxy-beta-D-galactopyra nosyl]oxy]-14,14-bis[[3-[[3-[[5-[[2-(acetylamino)-2-deoxy-b eta-D-galactopyranosyl]oxy]-1-oxopentyl]amino]propyl]amino] -3-oxopropoxy]methyl]-1,12,19,25-tetraoxo-16-oxa-13,20,24-t riazanonacos-1-yl]-4-hydroxy-2-pyrrolidinyl)methyl ester
  misc_feature 1..8: note = RNA
  misc_feature 10: note = RNA
  misc_feature 12..21: note = RNA
  misc_feature 9: note = DNA
  misc_feature 11: note = DNA
tccaactcctgcaccgttctt

SEQ ID NO: 514 - DNA, 21 bp, synthetic construct
  source 1..21: mol_type = other DNA
  modified_base 1: mod_base = OTHER; note = 2'-O-methylguanosine-3'-phosphorothioate
  modified_base 2: mod_base = OTHER; note = 2'-O-methyladenosine-3'-phosphorothioate
  modified_base 3: mod_base = OTHER; note = 2'-O-methylguanosine-3'-phosphate
  modified_base 4: mod_base = OTHER; note = 2'-O-methyladenosine-3'-phosphate
  modified_base 5: mod_base = OTHER; note = 2'-O-methyluridine-3'-phosphate
  modified_base 6: mod_base = OTHER; note = 2'-O-methylcytidine-3'-phosphate
  modified_base 7: mod_base = OTHER; note = 2'-O-methylguanosine-3'-phosphate
  modified_base 8: mod_base = OTHER; note = 2'-O-methylcytidine-3'-phosphate
  modified_base 10: mod_base = OTHER; note = 2'-O-methyluridine-3'-phosphate
  modified_base 12: mod_base = OTHER; note = 2'-O-methylguanosine-3'-phosphate
  modified_base 13: mod_base = OTHER; note = 2'-O-methylcytidine-3'-phosphate
  modified_base 14: mod_base = OTHER; note = 2'-O-methylcytidine-3'-phosphate
  modified_base 15: mod_base = OTHER; note = 2'-O-methylguanosine-3'-phosphate
  modified_base 16: mod_base = OTHER; note = 2'-O-methylcytidine-3'-phosphate
  modified_base 17: mod_base = OTHER; note = 2'-O-methylguanosine-3'-phosphate
  modified_base 18: mod_base = OTHER; note = 2'-O-methylcytidine-3'-phosphate
  modified_base 19: mod_base = OTHER; note = 2'-O-methyluridine-3'-phosphate
  modified_base 20: mod_base = OTHER; note = 2'-O-methyluridine-3'-phosphate
  modified_base 21: mod_base = OTHER; note = 2'-O-methyluridine-3'-phosphate ((2S,4R)-1-[29-[[2-(acetylamino)-2-deoxy-beta-D-galactopyra nosyl]oxy]-14,14-bis[[3-[[3-[[5-[[2-(acetylamino)-2-deoxy-b eta-D-galactopyranosyl]oxy]-1-oxopentyl]amino]propyl]amino] -3-oxopropoxy]methyl]-1,12,19,25-tetraoxo-16-oxa-13,20,24-t riazanonacos-1-yl]-4-hydroxy-2-pyrrolidinyl)methyl ester
  misc_feature 1..8: note = RNA
  misc_feature 10: note = RNA
  misc_feature 12..21: note = RNA
  misc_feature 9: note = DNA
  misc_feature 11: note = DNA
gagatcgcttagccgcgcttt

SEQ ID NO: 515 - DNA, 21 bp, synthetic construct
  source 1..21: mol_type = other DNA
  modified_base 1: mod_base = OTHER; note = 2'-O-methylcytidine-3'-phosphorothioate
  modified_base 2: mod_base = OTHER; note = 2'-O-methyluridine-3'-phosphorothioate
  modified_base 3: mod_base = OTHER; note = 2'-O-methylguanosine-3'-phosphate
  modified_base 4: mod_base = OTHER; note = 2'-O-methyluridine-3'-phosphate
  modified_base 5: mod_base = OTHER; note = 2'-O-methyluridine-3'-phosphate
  modified_base 6: mod_base = OTHER; note = 2'-O-methyluridine-3'-phosphate
  modified_base 7: mod_base = OTHER; note = 2'-O-methylguanosine-3'-phosphate
  modified_base 8: mod_base = OTHER; note = 2'-O-methylguanosine-3'-phosphate
  modified_base 10: mod_base = OTHER; note = 2'-O-methyluridine-3'-phosphate
  modified_base 12: mod_base = OTHER; note = 2'-O-methylcytidine-3'-phosphate
  modified_base 13: mod_base = OTHER; note = 2'-O-methylguanosine-3'-phosphate
  modified_base 14: mod_base = OTHER; note = 2'-O-methylguanosine-3'-phosphate
  modified_base 15: mod_base = OTHER; note = 2'-O-methyladenosine-3'-phosphate
  modified_base 16: mod_base = OTHER; note = 2'-O-methylguanosine-3'-phosphate
  modified_base 17: mod_base = OTHER; note = 2'-O-methyladenosine-3'-phosphate
  modified_base 18: mod_base = OTHER; note = 2'-O-methylcytidine-3'-phosphate
  modified_base 19: mod_base = OTHER; note = 2'-O-methylguanosine-3'-phosphate
  modified_base 20: mod_base = OTHER; note = 2'-O-methyluridine-3'-phosphate
  modified_base 21: mod_base = OTHER; note = 2'-O-methyluridine-3'-phosphate ((2S,4R)-1-[29-[[2-(acetylamino)-2-deoxy-beta-D-galactopyra nosyl]oxy]-14,14-bis[[3-[[3-[[5-[[2-(acetylamino)-2-deoxy-b eta-D-galactopyranosyl]oxy]-1-oxopentyl]amino]propyl]amino] -3-oxopropoxy]methyl]-1,12,19,25-tetraoxo-16-oxa-13,20,24-t riazanonacos-1-yl]-4-hydroxy-2-pyrrolidinyl)methyl ester
  misc_feature 1..8: note = RNA
  misc_feature 10: note = RNA
  misc_feature 12..21: note = RNA
  misc_feature 9: note = DNA
  misc_feature 11: note = DNA
ctgtttggctacggagacgtt

SEQ ID NO: 516 - DNA, 21 bp, synthetic construct
  source 1..21: mol_type = other DNA
  modified_base 1: mod_base = OTHER; note = 2'-O-methylguanosine-3'-phosphorothioate
  modified_base 2: mod_base = OTHER; note = 2'-O-methyladenosine-3'-phosphorothioate
  modified_base 3: mod_base = OTHER; note = 2'-O-methylguanosine-3'-phosphate
  modified_base 4: mod_base = OTHER; note = 2'-O-methylcytidine-3'-phosphate
  modified_base 5: mod_base = OTHER; note = 2'-O-methyluridine-3'-phosphate
  modified_base 6: mod_base = OTHER; note = 2'-O-methylguanosine-3'-phosphate
  modified_base 7: mod_base = OTHER; note = 2'-O-methylguanosine-3'-phosphate
  modified_base 8: mod_base = OTHER; note = 2'-O-methyladenosine-3'-phosphate
  modified_base 10: mod_base = OTHER; note = 2'-O-methyladenosine-3'-phosphate
  modified_base 12: mod_base = OTHER; note = 2'-O-methyladenosine-3'-phosphate
  modified_base 13: mod_base = OTHER; note = 2'-O-methylcytidine-3'-phosphate
  modified_base 14: mod_base = OTHER; note = 2'-O-methylcytidine-3'-phosphate
  modified_base 15: mod_base = OTHER; note = 2'-O-methyluridine-3'-phosphate
  modified_base 16: mod_base = OTHER; note = 2'-O-methyluridine-3'-phosphate
  modified_base 17: mod_base = OTHER; note = 2'-O-methylcytidine-3'-phosphate
  modified_base 18: mod_base = OTHER; note = 2'-O-methyladenosine-3'-phosphate
  modified_base 19: mod_base = OTHER; note = 2'-O-methyladenosine-3'-phosphate
  modified_base 20: mod_base = OTHER; note = 2'-O-methyluridine-3'-phosphate
  modified_base 21: mod_base = OTHER; note = 2'-O-methyluridine-3'-phosphate ((2S,4R)-1-[29-[[2-(acetylamino)-2-deoxy-beta-D-galactopyra nosyl]oxy]-14,14-bis[[3-[[3-[[5-[[2-(acetylamino)-2-deoxy-b eta-D-galactopyranosyl]oxy]-1-oxopentyl]amino]propyl]amino] -3-oxopropoxy]methyl]-1,12,19,25-tetraoxo-16-oxa-13,20,24-t riazanonacos-1-yl]-4-hydroxy-2-pyrrolidinyl)methyl ester
  misc_feature 1..8: note = RNA
  misc_feature 10: note = RNA
  misc_feature 12..21: note = RNA
  misc_feature 9: note = DNA
  misc_feature 11: note = DNA
gagctggagacaccttcaatt

SEQ ID NO: 517 - DNA, 21 bp, synthetic construct
  source 1..21: mol_type = other DNA
  modified_base 1: mod_base = OTHER; note = 2'-O-methylguanosine-3'-phosphorothioate
  modified_base 2: mod_base = OTHER; note = 2'-O-methylguanosine-3'-phosphorothioate
  modified_base 3: mod_base = OTHER; note = 2'-O-methylcytidine-3'-phosphate
  modified_base 4: mod_base = OTHER; note = 2'-O-methyluridine-3'-phosphate
  modified_base 5: mod_base = OTHER; note = 2'-O-methylguanosine-3'-phosphate
  modified_base 6: mod_base = OTHER; note = 2'-O-methyladenosine-3'-phosphate
  modified_base 7: mod_base = OTHER; note = 2'-O-methylguanosine-3'-phosphate
  modified_base 8: mod_base = OTHER; note = 2'-O-methyladenosine-3'-phosphate
  modified_base 10: mod_base = OTHER; note = 2'-O-methylguanosine-3'-phosphate
  modified_base 12: mod_base = OTHER; note = 2'-O-methylguanosine-3'-phosphate
  modified_base 13: mod_base = OTHER; note = 2'-O-methylguanosine-3'-phosphate
  modified_base 14: mod_base = OTHER; note = 2'-O-methylguanosine-3'-phosphate
  modified_base 15: mod_base = OTHER; note = 2'-O-methyladenosine-3'-phosphate
  modified_base 16: mod_base = OTHER; note = 2'-O-methylguanosine-3'-phosphate
  modified_base 17: mod_base = OTHER; note = 2'-O-methylguanosine-3'-phosphate
  modified_base 18: mod_base = OTHER; note = 2'-O-methylcytidine-3'-phosphate
  modified_base 19: mod_base = OTHER; note = 2'-O-methylguanosine-3'-phosphate
  modified_base 20: mod_base = OTHER; note = 2'-O-methyluridine-3'-phosphate
  modified_base 21: mod_base = OTHER; note = 2'-O-methyluridine-3'-phosphate ((2S,4R)-1-[29-[[2-(acetylamino)-2-deoxy-beta-D-galactopyra nosyl]oxy]-14,14-bis[[3-[[3-[[5-[[2-(acetylamino)-2-deoxy-b eta-D-galactopyranosyl]oxy]-1-oxopentyl]amino]propyl]amino] -3-oxopropoxy]methyl]-1,12,19,25-tetraoxo-16-oxa-13,20,24-t riazanonacos-1-yl]-4-hydroxy-2-pyrrolidinyl)methyl ester
  misc_feature 1..8: note = RNA
  misc_feature 10: note = RNA
  misc_feature 12..21: note = RNA
  misc_feature 9: note = DNA
  misc_feature 11: note = DNA
ggctgagaagtgggaggcgtt

SEQ ID NO: 518 - DNA, 21 bp, synthetic construct
  source 1..21: mol_type = other DNA
  modified_base 1: mod_base = OTHER; note = 2'-O-methylguanosine-3'-phosphorothioate
  modified_base 2: mod_base = OTHER; note = 2'-O-methyladenosine-3'-phosphorothioate
  modified_base 3: mod_base = OTHER; note = 2'-O-methylguanosine-3'-phosphate
  modified_base 4: mod_base = OTHER; note = 2'-O-methyladenosine-3'-phosphate
  modified_base 5: mod_base = OTHER; note = 2'-O-methylcytidine-3'-phosphate
  modified_base 6: mod_base = OTHER; note = 2'-O-methylguanosine-3'-phosphate
  modified_base 7: mod_base = OTHER; note = 2'-O-methyluridine-3'-phosphate
  modified_base 8: mod_base = OTHER; note = 2'-O-methylguanosine-3'-phosphate
  modified_base 10: mod_base = OTHER; note = 2'-O-methyluridine-3'-phosphate
  modified_base 12: mod_base = OTHER; note = 2'-O-methyluridine-3'-phosphate
  modified_base 13: mod_base = OTHER; note = 2'-O-methyluridine-3'-phosphate
  modified_base 14: mod_base = OTHER; note = 2'-O-methyluridine-3'-phosphate
  modified_base 15: mod_base = OTHER; note = 2'-O-methylguanosine-3'-phosphate
  modified_base 16: mod_base = OTHER; note = 2'-O-methyluridine-3'-phosphate
  modified_base 17: mod_base = OTHER; note = 2'-O-methylcytidine-3'-phosphate
  modified_base 18: mod_base = OTHER; note = 2'-O-methyladenosine-3'-phosphate
  modified_base 19: mod_base = OTHER; note = 2'-O-methylguanosine-3'-phosphate
  modified_base 20: mod_base = OTHER; note = 2'-O-methylcytidine-3'-phosphate
  modified_base 21: mod_base = OTHER; note = 2'-O-methyladenosine-3'-phosphate ((2S,4R)-1-[29-[[2-(acetylamino)-2-deoxy-beta-D-galactopyra nosyl]oxy]-14,14-bis[[3-[[3-[[5-[[2-(acetylamino)-2-deoxy-b eta-D-galactopyranosyl]oxy]-1-oxopentyl]amino]propyl]amino] -3-oxopropoxy]methyl]-1,12,19,25-tetraoxo-16-oxa-13,20,24-t riazanonacos-1-yl]-4-hydroxy-2-pyrrolidinyl)methyl ester
  misc_feature 1..8: note = RNA
  misc_feature 10: note = RNA
  misc_feature 12..21: note = RNA
  misc_feature 9: note = DNA
  misc_feature 11: note = DNA
gagacgtggtgtttgtcagca

SEQ ID NO: 519 - DNA, 21 bp, synthetic construct
  source 1..21: mol_type = other DNA
  modified_base 1: mod_base = OTHER; note = 2'-O-methyladenosine-3'-phosphorothioate
  modified_base 2: mod_base = OTHER; note = 2'-O-methylguanosine-3'-phosphorothioate
  modified_base 3: mod_base = OTHER; note = 2'-O-methyladenosine-3'-phosphate
  modified_base 4: mod_base = OTHER; note = 2'-O-methylguanosine-3'-phosphate
  modified_base 5: mod_base = OTHER; note = 2'-O-methyladenosine-3'-phosphate
  modified_base 6: mod_base = OTHER; note = 2'-O-methyladenosine-3'-phosphate
  modified_base 7: mod_base = OTHER; note = 2'-O-methylguanosine-3'-phosphate
  modified_base 8: mod_base = OTHER; note = 2'-O-methylcytidine-3'-phosphate
  modified_base 10: mod_base = OTHER; note = 2'-O-methylguanosine-3'-phosphate
  modified_base 12: mod_base = OTHER; note = 2'-O-methyluridine-3'-phosphate
  modified_base 13: mod_base = OTHER; note = 2'-O-methylcytidine-3'-phosphate
  modified_base 14: mod_base = OTHER; note = 2'-O-methylcytidine-3'-phosphate
  modified_base 15: mod_base = OTHER; note = 2'-O-methyluridine-3'-phosphate
  modified_base 16: mod_base = OTHER; note = 2'-O-methylguanosine-3'-phosphate
  modified_base 17: mod_base = OTHER; note = 2'-O-methyluridine-3'-phosphate
  modified_base 18: mod_base = OTHER; note = 2'-O-methylguanosine-3'-phosphate
  modified_base 19: mod_base = OTHER; note = 2'-O-methylcytidine-3'-phosphate
  modified_base 20: mod_base = OTHER; note = 2'-O-methylguanosine-3'-phosphate
  modified_base 21: mod_base = OTHER; note = 2'-O-methyluridine-3'-phosphate ((2S,4R)-1-[29-[[2-(acetylamino)-2-deoxy-beta-D-galactopyra nosyl]oxy]-14,14-bis[[3-[[3-[[5-[[2-(acetylamino)-2-deoxy-b eta-D-galactopyranosyl]oxy]-1-oxopentyl]amino]propyl]amino] -3-oxopropoxy]methyl]-1,12,19,25-tetraoxo-16-oxa-13,20,24-t riazanonacos-1-yl]-4-hydroxy-2-pyrrolidinyl)methyl ester
  misc_feature 1..8: note = RNA
  misc_feature 10: note = RNA
  misc_feature 12..21: note = RNA
  misc_feature 9: note = DNA
  misc_feature 11: note = DNA
agagaagcagatcctgtgcgt

SEQ ID NO: 520 - DNA, 21 bp, synthetic construct
  source 1..21: mol_type = other DNA
  modified_base 1: mod_base = OTHER; note = 2'-O-methyluridine-3'-phosphorothioate
  modified_base 2: mod_base = OTHER; note = 2'-O-methyluridine-3'-phosphorothioate
  modified_base 3: mod_base = OTHER; note = 2'-O-methyluridine-3'-phosphate
  modified_base 4: mod_base = OTHER; note = 2'-O-methyluridine-3'-phosphate
  modified_base 5: mod_base = OTHER; note = 2'-O-methylcytidine-3'-phosphate
  modified_base 6: mod_base = OTHER; note = 2'-O-methyluridine-3'-phosphate
  modified_base 7: mod_base = OTHER; note = 2'-O-methylcytidine-3'-phosphate
  modified_base 8: mod_base = OTHER; note = 2'-O-methyluridine-3'-phosphate
  modified_base 10: mod_base = OTHER; note = 2'-O-methyluridine-3'-phosphate
  modified_base 12: mod_base = OTHER; note = 2'-O-methylcytidine-3'-phosphate
  modified_base 13: mod_base = OTHER; note = 2'-O-methyladenosine-3'-phosphate
  modified_base 14: mod_base = OTHER; note = 2'-O-methyluridine-3'-phosphate
  modified_base 15: mod_base = OTHER; note = 2'-O-methyluridine-3'-phosphate
  modified_base 16: mod_base = OTHER; note = 2'-O-methylcytidine-3'-phosphate
  modified_base 17: mod_base = OTHER; note = 2'-O-methyluridine-3'-phosphate
  modified_base 18: mod_base = OTHER; note = 2'-O-methylcytidine-3'-phosphate
  modified_base 19: mod_base = OTHER; note = 2'-O-methylguanosine-3'-phosphate
  modified_base 20: mod_base = OTHER; note = 2'-O-methyladenosine-3'-phosphate
  modified_base 21: mod_base = OTHER; note = 2'-O-methyluridine-3'-phosphate ((2S,4R)-1-[29-[[2-(acetylamino)-2-deoxy-beta-D-galactopyra nosyl]oxy]-14,14-bis[[3-[[3-[[5-[[2-(acetylamino)-2-deoxy-b eta-D-galactopyranosyl]oxy]-1-oxopentyl]amino]propyl]amino] -3-oxopropoxy]methyl]-1,12,19,25-tetraoxo-16-oxa-13,20,24-t riazanonacos-1-yl]-4-hydroxy-2-pyrrolidinyl)methyl ester
  misc_feature 1..8: note = RNA
  misc_feature 10: note = RNA
  misc_feature 12..21: note = RNA
  misc_feature 9: note = DNA
  misc_feature 11: note = DNA
ttttctctttgcattctcgat

SEQ ID NO: 521 - DNA, 21 bp, synthetic construct
  source 1..21: mol_type = other DNA
  modified_base 1: mod_base = OTHER; note = 2'-O-methylguanosine-3'-phosphorothioate
  modified_base 2: mod_base = OTHER; note = 2'-O-methylguanosine-3'-phosphorothioate
  modified_base 3: mod_base = OTHER; note = 2'-O-methyladenosine-3'-phosphate
  modified_base 4: mod_base = OTHER; note = 2'-O-methylguanosine-3'-phosphate
  modified_base 5: mod_base = OTHER; note = 2'-O-methylcytidine-3'-phosphate
  modified_base 6: mod_base = OTHER; note = 2'-O-methylcytidine-3'-phosphate
  modified_base 7: mod_base = OTHER; note = 2'-O-methylcytidine-3'-phosphate
  modified_base 8: mod_base = OTHER; note = 2'-O-methyladenosine-3'-phosphate
  modified_base 10: mod_base = OTHER; note = 2'-O-methylcytidine-3'-phosphate
  modified_base 12: mod_base = OTHER; note = 2'-O-methyluridine-3'-phosphate
  modified_base 13: mod_base = OTHER; note = 2'-O-methylguanosine-3'-phosphate
  modified_base 14: mod_base = OTHER; note = 2'-O-methylguanosine-3'-phosphate
  modified_base 15: mod_base = OTHER; note = 2'-O-methyladenosine-3'-phosphate
  modified_base 16: mod_base = OTHER; note = 2'-O-methyladenosine-3'-phosphate
  modified_base 17: mod_base = OTHER; note = 2'-O-methyluridine-3'-phosphate
  modified_base 18: mod_base = OTHER; note = 2'-O-methyluridine-3'-phosphate
  modified_base 19: mod_base = OTHER; note = 2'-O-methyladenosine-3'-phosphate
  modified_base 20: mod_base = OTHER; note = 2'-O-methyladenosine-3'-phosphate
  modified_base 21: mod_base = OTHER; note = 2'-O-methyluridine-3'-phosphate ((2S,4R)-1-[29-[[2-(acetylamino)-2-deoxy-beta-D-galactopyra nosyl]oxy]-14,14-bis[[3-[[3-[[5-[[2-(acetylamino)-2-deoxy-b eta-D-galactopyranosyl]oxy]-1-oxopentyl]amino]propyl]amino] -3-oxopropoxy]methyl]-1,12,19,25-tetraoxo-16-oxa-13,20,24-t riazanonacos-1-yl]-4-hydroxy-2-pyrrolidinyl)methyl ester
  misc_feature 1..8: note = RNA
  misc_feature 10: note = RNA
  misc_feature 12..21: note = RNA
  misc_feature 9: note = DNA
  misc_feature 11: note = DNA
ggagcccaccttggaattaat

SEQ ID NO: 522 - DNA, 21 bp, synthetic construct
  source 1..21: mol_type = other DNA
  modified_base 1: mod_base = OTHER; note = 2'-O-methyluridine-3'-phosphorothioate
  modified_base 2: mod_base = OTHER; note = 2'-O-methyluridine-3'-phosphorothioate
  modified_base 3: mod_base = OTHER; note = 2'-O-methyluridine-3'-phosphate
  modified_base 4: mod_base = OTHER; note = 2'-O-methylguanosine-3'-phosphate
  modified_base 5: mod_base = OTHER; note = 2'-O-methylcytidine-3'-phosphate
  modified_base 6: mod_base = OTHER; note = 2'-O-methyladenosine-3'-phosphate
  modified_base 7: mod_base = OTHER; note = 2'-O-methyluridine-3'-phosphate
  modified_base 8: mod_base = OTHER; note = 2'-O-methyluridine-3'-phosphate
  modified_base 10: mod_base = OTHER; note = 2'-O-methyluridine-3'-phosphate
  modified_base 12: mod_base = OTHER; note = 2'-O-methylguanosine-3'-phosphate
  modified_base 13: mod_base = OTHER; note = 2'-O-methyladenosine-3'-phosphate
  modified_base 14: mod_base = OTHER; note = 2'-O-methylguanosine-3'-phosphate
  modified_base 15: mod_base = OTHER; note = 2'-O-methyladenosine-3'-phosphate
  modified_base 16: mod_base = OTHER; note = 2'-O-methyluridine-3'-phosphate
  modified_base 17: mod_base = OTHER; note = 2'-O-methylcytidine-3'-phosphate
  modified_base 18: mod_base = OTHER; note = 2'-O-methylguanosine-3'-phosphate
  modified_base 19: mod_base = OTHER; note = 2'-O-methylcytidine-3'-phosphate
  modified_base 20: mod_base = OTHER; note = 2'-O-methyluridine-3'-phosphate
  modified_base 21: mod_base = OTHER; note = 2'-O-methyluridine-3'-phosphate ((2S,4R)-1-[29-[[2-(acetylamino)-2-deoxy-beta-D-galactopyra nosyl]oxy]-14,14-bis[[3-[[3-[[5-[[2-(acetylamino)-2-deoxy-b eta-D-galactopyranosyl]oxy]-1-oxopentyl]amino]propyl]amino] -3-oxopropoxy]methyl]-1,12,19,25-tetraoxo-16-oxa-13,20,24-t riazanonacos-1-yl]-4-hydroxy-2-pyrrolidinyl)methyl ester
  misc_feature 1..8: note = RNA
  misc_feature 10: note = RNA
  misc_feature 12..21: note = RNA
  misc_feature 9: note = DNA
  misc_feature 11: note = DNA
tttgcattctcgagatcgctt

SEQ ID NO: 523 - DNA, 21 bp, synthetic construct
  source 1..21: mol_type = other DNA
  modified_base 1: mod_base = OTHER; note = 2'-O-methylcytidine-3'-phosphorothioate
  modified_base 2: mod_base = OTHER; note = 2'-O-methyluridine-3'-phosphorothioate
  modified_base 3: mod_base = OTHER; note = 2'-O-methylcytidine-3'-phosphate
  modified_base 4: mod_base = OTHER; note = 2'-O-methylcytidine-3'-phosphate
  modified_base 5: mod_base = OTHER; note = 2'-O-methyladenosine-3'-phosphate
  modified_base 6: mod_base = OTHER; note = 2'-O-methylcytidine-3'-phosphate
  modified_base 7: mod_base = OTHER; note = 2'-O-methyluridine-3'-phosphate
  modified_base 8: mod_base = OTHER; note = 2'-O-methylcytidine-3'-phosphate
  modified_base 10: mod_base = OTHER; note = 2'-O-methylguanosine-3'-phosphate
  modified_base 12: mod_base = OTHER; note = 2'-O-methyluridine-3'-phosphate
  modified_base 13: mod_base = OTHER; note = 2'-O-methylguanosine-3'-phosphate
  modified_base 14: mod_base = OTHER; note = 2'-O-methylcytidine-3'-phosphate
  modified_base 15: mod_base = OTHER; note = 2'-O-methyluridine-3'-phosphate
  modified_base 16: mod_base = OTHER; note = 2'-O-methyluridine-3'-phosphate
  modified_base 17: mod_base = OTHER; note = 2'-O-methyluridine-3'-phosphate
  modified_base 18: mod_base = OTHER; note = 2'-O-methylcytidine-3'-phosphate
  modified_base 19: mod_base = OTHER; note = 2'-O-methylcytidine-3'-phosphate
  modified_base 20: mod_base = OTHER; note = 2'-O-methylcytidine-3'-phosphate
  modified_base 21: mod_base = OTHER; note = 2'-O-methyluridine-3'-phosphate ((2S,4R)-1-[29-[[2-(acetylamino)-2-deoxy-beta-D-galactopyra nosyl]oxy]-14,14-bis[[3-[[3-[[5-[[2-(acetylamino)-2-deoxy-b eta-D-galactopyranosyl]oxy]-1-oxopentyl]amino]propyl]amino] -3-oxopropoxy]methyl]-1,12,19,25-tetraoxo-16-oxa-13,20,24-t riazanonacos-1-yl]-4-hydroxy-2-pyrrolidinyl)methyl ester
  misc_feature 1..8: note = RNA
  misc_feature 10: note = RNA
  misc_feature 12..21: note = RNA
  misc_feature 9: note = DNA
  misc_feature 11: note = DNA
ctccactcggatgctttccct

SEQ ID NO: 524 - DNA, 21 bp, synthetic construct
  source 1..21: mol_type = other DNA
  modified_base 1: mod_base = OTHER; note = 2'-O-methylguanosine-3'-phosphorothioate
  modified_base 2: mod_base = OTHER; note = 2'-O-methylguanosine-3'-phosphorothioate
  modified_base 3: mod_base = OTHER; note = 2'-O-methylcytidine-3'-phosphate
  modified_base 4: mod_base = OTHER; note = 2'-O-methyluridine-3'-phosphate
  modified_base 5: mod_base = OTHER; note = 2'-O-methyluridine-3'-phosphate
  modified_base 6: mod_base = OTHER; note = 2'-O-methylguanosine-3'-phosphate
  modified_base 7: mod_base = OTHER; note = 2'-O-methyluridine-3'-phosphate
  modified_base 8: mod_base = OTHER; note = 2'-O-methyladenosine-3'-phosphate
  modified_base 10: mod_base = OTHER; note = 2'-O-methylguanosine-3'-phosphate
  modified_base 12: mod_base = OTHER; note = 2'-O-methyluridine-3'-phosphate
  modified_base 13: mod_base = OTHER; note = 2'-O-methylcytidine-3'-phosphate
  modified_base 14: mod_base = OTHER; note = 2'-O-methylguanosine-3'-phosphate
  modified_base 15: mod_base = OTHER; note = 2'-O-methyluridine-3'-phosphate
  modified_base 16: mod_base = OTHER; note = 2'-O-methylguanosine-3'-phosphate
  modified_base 17: mod_base = OTHER; note = 2'-O-methyluridine-3'-phosphate
  modified_base 18: mod_base = OTHER; note = 2'-O-methylguanosine-3'-phosphate
  modified_base 19: mod_base = OTHER; note = 2'-O-methyladenosine-3'-phosphate
  modified_base 20: mod_base = OTHER; note = 2'-O-methylguanosine-3'-phosphate
  modified_base 21: mod_base = OTHER; note = 2'-O-methyluridine-3'-phosphate ((2S,4R)-1-[29-[[2-(acetylamino)-2-deoxy-beta-D-galactopyra nosyl]oxy]-14,14-bis[[3-[[3-[[5-[[2-(acetylamino)-2-deoxy-b eta-D-galactopyranosyl]oxy]-1-oxopentyl]amino]propyl]amino] -3-oxopropoxy]methyl]-1,12,19,25-tetraoxo-16-oxa-13,20,24-t riazanonacos-1-yl]-4-hydroxy-2-pyrrolidinyl)methyl ester
  misc_feature 1..8: note = RNA
  misc_feature 10: note = RNA
  misc_feature 12..21: note = RNA
  misc_feature 9: note = DNA
  misc_feature 11: note = DNA
ggcttgtatggtcgtgtgagt

SEQ ID NO: 525 - DNA, 21 bp, synthetic construct
  source 1..21: mol_type = other DNA
  modified_base 1: mod_base = OTHER; note = 2'-O-methylguanosine-3'-phosphorothioate
  modified_base 2: mod_base = OTHER; note = 2'-O-methylguanosine-3'-phosphorothioate
  modified_base 3: mod_base = OTHER; note = 2'-O-methylcytidine-3'-phosphate
  modified_base 4: mod_base = OTHER; note = 2'-O-methyluridine-3'-phosphate
  modified_base 5: mod_base = OTHER; note = 2'-O-methyladenosine-3'-phosphate
  modified_base 6: mod_base = OTHER; note = 2'-O-methylcytidine-3'-phosphate
  modified_base 7: mod_base = OTHER; note = 2'-O-methylguanosine-3'-phosphate
  modified_base 8: mod_base = OTHER; note = 2'-O-methylguanosine-3'-phosphate
  modified_base 10: mod_base = OTHER; note = 2'-O-methylguanosine-3'-phosphate
  modified_base 12: mod_base = OTHER; note = 2'-O-methylcytidine-3'-phosphate
  modified_base 13: mod_base = OTHER; note = 2'-O-methylguanosine-3'-phosphate
  modified_base 14: mod_base = OTHER; note = 2'-O-methyluridine-3'-phosphate
  modified_base 15: mod_base = OTHER; note = 2'-O-methylguanosine-3'-phosphate
  modified_base 16: mod_base = OTHER; note = 2'-O-methylguanosine-3'-phosphate
  modified_base 17: mod_base = OTHER; note = 2'-O-methyluridine-3'-phosphate
  modified_base 18: mod_base = OTHER; note = 2'-O-methylguanosine-3'-phosphate
  modified_base 19: mod_base = OTHER; note = 2'-O-methyluridine-3'-phosphate
  modified_base 20: mod_base = OTHER; note = 2'-O-methyluridine-3'-phosphate
  modified_base 21: mod_base = OTHER; note = 2'-O-methyluridine-3'-phosphate ((2S,4R)-1-[29-[[2-(acetylamino)-2-deoxy-beta-D-galactopyra nosyl]oxy]-14,14-bis[[3-[[3-[[5-[[2-(acetylamino)-2-deoxy-b eta-D-galactopyranosyl]oxy]-1-oxopentyl]amino]propyl]amino] -3-oxopropoxy]methyl]-1,12,19,25-tetraoxo-16-oxa-13,20,24-t riazanonacos-1-yl]-4-hydroxy-2-pyrrolidinyl)methyl ester
  misc_feature 1..8: note = RNA
  misc_feature 10: note = RNA
  misc_feature 12..21: note = RNA
  misc_feature 9: note = DNA
  misc_feature 11: note = DNA
ggctacggagacgtggtgttt

SEQ ID NO: 526 - DNA, 21 bp, synthetic construct
  source 1..21: mol_type = other DNA
  modified_base 1: mod_base = OTHER; note = 2'-O-methyluridine-3'-phosphorothioate
  modified_base 2: mod_base = OTHER; note = 2'-O-methyluridine-3'-phosphorothioate
  modified_base 3: mod_base = OTHER; note = 2'-O-methylguanosine-3'-phosphate
  modified_base 4: mod_base = OTHER; note = 2'-O-methyladenosine-3'-phosphate
  modified_base 5: mod_base = OTHER; note = 2'-O-methylguanosine-3'-phosphate
  modified_base 6: mod_base = OTHER; note = 2'-O-methyladenosine-3'-phosphate
  modified_base 7: mod_base = OTHER; note = 2'-O-methyladenosine-3'-phosphate
  modified_base 8: mod_base = OTHER; note = 2'-O-methylguanosine-3'-phosphate
  modified_base 10: mod_base = OTHER; note = 2'-O-methyluridine-3'-phosphate
  modified_base 12: mod_base = OTHER; note = 2'-O-methylguanosine-3'-phosphate
  modified_base 13: mod_base = OTHER; note = 2'-O-methyladenosine-3'-phosphate
  modified_base 14: mod_base = OTHER; note = 2'-O-methyluridine-3'-phosphate
  modified_base 15: mod_base = OTHER; note = 2'-O-methylcytidine-3'-phosphate
  modified_base 16: mod_base = OTHER; note = 2'-O-methyluridine-3'-phosphate
  modified_base 17: mod_base = OTHER; note = 2'-O-methylguanosine-3'-phosphate
  modified_base 18: mod_base = OTHER; note = 2'-O-methyladenosine-3'-phosphate
  modified_base 19: mod_base = OTHER; note = 2'-O-methylcytidine-3'-phosphate
  modified_base 20: mod_base = OTHER; note = 2'-O-methylcytidine-3'-phosphate
  modified_base 21: mod_base = OTHER; note = 2'-O-methyluridine-3'-phosphate ((2S,4R)-1-[29-[[2-(acetylamino)-2-deoxy-beta-D-galactopyra nosyl]oxy]-14,14-bis[[3-[[3-[[5-[[2-(acetylamino)-2-deoxy-b eta-D-galactopyranosyl]oxy]-1-oxopentyl]amino]propyl]amino] -3-oxopropoxy]methyl]-1,12,19,25-tetraoxo-16-oxa-13,20,24-t riazanonacos-1-yl]-4-hydroxy-2-pyrrolidinyl)methyl ester
  misc_feature 1..8: note = RNA
  misc_feature 10: note = RNA
  misc_feature 12..21: note = RNA
  misc_feature 9: note = DNA
  misc_feature 11: note = DNA
ttgagaaggttgatctgacct

SEQ ID NO: 527 - DNA, 21 bp, synthetic construct
  source 1..21: mol_type = other DNA
  modified_base 1: mod_base = OTHER; note = 2'-O-methylguanosine-3'-phosphorothioate
  modified_base 2: mod_base = OTHER; note = 2'-O-methyladenosine-3'-phosphorothioate
  modified_base 3: mod_base = OTHER; note = 2'-O-methylguanosine-3'-phosphate
  modified_base 4: mod_base = OTHER; note = 2'-O-methylcytidine-3'-phosphate
  modified_base 5: mod_base = OTHER; note = 2'-O-methylcytidine-3'-phosphate
  modified_base 6: mod_base = OTHER; note = 2'-O-methylcytidine-3'-phosphate
  modified_base 7: mod_base = OTHER; note = 2'-O-methyladenosine-3'-phosphate
  modified_base 8: mod_base = OTHER; note = 2'-O-methylcytidine-3'-phosphate
  modified_base 10: mod_base = OTHER; note = 2'-O-methyluridine-3'-phosphate
  modified_base 12: mod_base = OTHER; note = 2'-O-methylguanosine-3'-phosphate
  modified_base 13: mod_base = OTHER; note = 2'-O-methylguanosine-3'-phosphate
  modified_base 14: mod_base = OTHER; note = 2'-O-methyladenosine-3'-phosphate
  modified_base 15: mod_base = OTHER; note = 2'-O-methyladenosine-3'-phosphate
  modified_base 16: mod_base = OTHER; note = 2'-O-methyluridine-3'-phosphate
  modified_base 17: mod_base = OTHER; note = 2'-O-methyluridine-3'-phosphate
  modified_base 18: mod_base = OTHER; note = 2'-O-methyladenosine-3'-phosphate
  modified_base 19: mod_base = OTHER; note = 2'-O-methyladenosine-3'-phosphate
  modified_base 20: mod_base = OTHER; note = 2'-O-methylguanosine-3'-phosphate
  modified_base 21: mod_base = OTHER; note = 2'-O-methyluridine-3'-phosphate ((2S,4R)-1-[29-[[2-(acetylamino)-2-deoxy-beta-D-galactopyra nosyl]oxy]-14,14-bis[[3-[[3-[[5-[[2-(acetylamino)-2-deoxy-b eta-D-galactopyranosyl]oxy]-1-oxopentyl]amino]propyl]amino] -3-oxopropoxy]methyl]-1,12,19,25-tetraoxo-16-oxa-13,20,24-t riazanonacos-1-yl]-4-hydroxy-2-pyrrolidinyl)methyl ester
  misc_feature 1..8: note = RNA
  misc_feature 10: note = RNA
  misc_feature 12..21: note = RNA
  misc_feature 9: note = DNA
  misc_feature 11: note = DNA
gagcccaccttggaattaagt

SEQ ID NO: 528 - DNA, 21 bp, synthetic construct
  source 1..21: mol_type = other DNA
  modified_base 1: mod_base = OTHER; note = 2'-O-methylcytidine-3'-phosphorothioate
  modified_base 2: mod_base = OTHER; note = 2'-O-methyluridine-3'-phosphorothioate
  modified_base 3: mod_base = OTHER; note = 2'-O-methyluridine-3'-phosphate
  modified_base 4: mod_base = OTHER; note = 2'-O-methylguanosine-3'-phosphate
  modified_base 5: mod_base = OTHER; note = 2'-O-methyluridine-3'-phosphate
  modified_base 6: mod_base = OTHER; note = 2'-O-methylcytidine-3'-phosphate
  modified_base 7: mod_base = OTHER; note = 2'-O-methyluridine-3'-phosphate
  modified_base 8: mod_base = OTHER; note = 2'-O-methylguanosine-3'-phosphate
  modified_base 10: mod_base = OTHER; note = 2'-O-methylguanosine-3'-phosphate
  modified_base 12: mod_base = OTHER; note = 2'-O-methylcytidine-3'-phosphate
  modified_base 13: mod_base = OTHER; note = 2'-O-methyluridine-3'-phosphate
  modified_base 14: mod_base = OTHER; note = 2'-O-methylguanosine-3'-phosphate
  modified_base 15: mod_base = OTHER; note = 2'-O-methylguanosine-3'-phosphate
  modified_base 16: mod_base = OTHER; note = 2'-O-methylguanosine-3'-phosphate
  modified_base 17: mod_base = OTHER; note = 2'-O-methylcytidine-3'-phosphate
  modified_base 18: mod_base = OTHER; note = 2'-O-methyluridine-3'-phosphate
  modified_base 19: mod_base = OTHER; note = 2'-O-methylguanosine-3'-phosphate
  modified_base 20: mod_base = OTHER; note = 2'-O-methyladenosine-3'-phosphate
  modified_base 21: mod_base = OTHER; note = 2'-O-methyluridine-3'-phosphate ((2S,4R)-1-[29-[[2-(acetylamino)-2-deoxy-beta-D-galactopyra nosyl]oxy]-14,14-bis[[3-[[3-[[5-[[2-(acetylamino)-2-deoxy-b eta-D-galactopyranosyl]oxy]-1-oxopentyl]amino]propyl]amino] -3-oxopropoxy]methyl]-1,12,19,25-tetraoxo-16-oxa-13,20,24-t riazanonacos-1-yl]-4-hydroxy-2-pyrrolidinyl)methyl ester
  misc_feature 1..8: note = RNA
  misc_feature 10: note = RNA
  misc_feature 12..21: note = RNA
  misc_feature 9: note = DNA
  misc_feature 11: note = DNA
cttgtctgtgcctgggctgat

SEQ ID NO: 529 - DNA, 21 bp, synthetic construct
  source 1..21: mol_type = other DNA
  modified_base 1: mod_base = OTHER; note = 2'-O-methyluridine-3'-phosphorothioate
  modified_base 2: mod_base = OTHER; note = 2'-O-methylcytidine-3'-phosphorothioate
  modified_base 3: mod_base = OTHER; note = 2'-O-methyluridine-3'-phosphate
  modified_base 4: mod_base = OTHER; note = 2'-O-methyluridine-3'-phosphate
  modified_base 5: mod_base = OTHER; note = 2'-O-methyluridine-3'-phosphate
  modified_base 6: mod_base = OTHER; note = 2'-O-methylguanosine-3'-phosphate
  modified_base 7: mod_base = OTHER; note = 2'-O-methylcytidine-3'-phosphate
  modified_base 8: mod_base = OTHER; note = 2'-O-methyladenosine-3'-phosphate
  modified_base 10: mod_base = OTHER; note = 2'-O-methyluridine-3'-phosphate
  modified_base 12: mod_base = OTHER; note = 2'-O-methyluridine-3'-phosphate
  modified_base 13: mod_base = OTHER; note = 2'-O-methylcytidine-3'-phosphate
  modified_base 14: mod_base = OTHER; note = 2'-O-methylguanosine-3'-phosphate
  modified_base 15: mod_base = OTHER; note = 2'-O-methyladenosine-3'-phosphate
  modified_base 16: mod_base = OTHER; note = 2'-O-methylguanosine-3'-phosphate
  modified_base 17: mod_base = OTHER; note = 2'-O-methyladenosine-3'-phosphate
  modified_base 18: mod_base = OTHER; note = 2'-O-methyluridine-3'-phosphate
  modified_base 19: mod_base = OTHER; note = 2'-O-methylcytidine-3'-phosphate
  modified_base 20: mod_base = OTHER; note = 2'-O-methylguanosine-3'-phosphate
  modified_base 21: mod_base = OTHER; note = 2'-O-methyluridine-3'-phosphate ((2S,4R)-1-[29-[[2-(acetylamino)-2-deoxy-beta-D-galactopyra nosyl]oxy]-14,14-bis[[3-[[3-[[5-[[2-(acetylamino)-2-deoxy-b eta-D-galactopyranosyl]oxy]-1-oxopentyl]amino]propyl]amino] -3-oxopropoxy]methyl]-1,12,19,25-tetraoxo-16-oxa-13,20,24-t riazanonacos-1-yl]-4-hydroxy-2-pyrrolidinyl)methyl ester
  misc_feature 1..8: note = RNA
  misc_feature 10: note = RNA
  misc_feature 12..21: note = RNA
  misc_feature 9: note = DNA
  misc_feature 11: note = DNA
tctttgcattctcgagatcgt

SEQ ID NO: 530 - DNA, 21 bp, synthetic construct
  source 1..21: mol_type = other DNA
  modified_base 1: mod_base = OTHER; note = 2'-O-methylguanosine-3'-phosphorothioate
  modified_base 2: mod_base = OTHER; note = 2'-O-methylcytidine-3'-phosphorothioate
  modified_base 3: mod_base = OTHER; note = 2'-O-methyladenosine-3'-phosphate
  modified_base 4: mod_base = OTHER; note = 2'-O-methylguanosine-3'-phosphate
  modified_base 5: mod_base = OTHER; note = 2'-O-methylguanosine-3'-phosphate
  modified_base 6: mod_base = OTHER; note = 2'-O-methyladenosine-3'-phosphate
  modified_base 7: mod_base = OTHER; note = 2'-O-methyladenosine-3'-phosphate
  modified_base 8: mod_base = OTHER; note = 2'-O-methylguanosine-3'-phosphate
  modified_base 10: mod_base = OTHER; note = 2'-O-methyladenosine-3'-phosphate
  modified_base 12: mod_base = OTHER; note = 2'-O-methyluridine-3'-phosphate
  modified_base 13: mod_base = OTHER; note = 2'-O-methylguanosine-3'-phosphate
  modified_base 14: mod_base = OTHER; note = 2'-O-methyladenosine-3'-phosphate
  modified_base 15: mod_base = OTHER; note = 2'-O-methylguanosine-3'-phosphate
  modified_base 16: mod_base = OTHER; note = 2'-O-methyladenosine-3'-phosphate
  modified_base 17: mod_base = OTHER; note = 2'-O-methyluridine-3'-phosphate
  modified_base 18: mod_base = OTHER; note = 2'-O-methyluridine-3'-phosphate
  modified_base 19: mod_base = OTHER; note = 2'-O-methylcytidine-3'-phosphate
  modified_base 20: mod_base = OTHER; note = 2'-O-methylguanosine-3'-phosphate
  modified_base 21: mod_base = OTHER; note = 2'-O-methyluridine-3'-phosphate ((2S,4R)-1-[29-[[2-(acetylamino)-2-deoxy-beta-D-galactopyra nosyl]oxy]-14,14-bis[[3-[[3-[[5-[[2-(acetylamino)-2-deoxy-b eta-D-galactopyranosyl]oxy]-1-oxopentyl]amino]propyl]amino] -3-oxopropoxy]methyl]-1,12,19,25-tetraoxo-16-oxa-13,20,24-t riazanonacos-1-yl]-4-hydroxy-2-pyrrolidinyl)methyl ester
  misc_feature 1..8: note = RNA
  misc_feature 10: note = RNA
  misc_feature 12..21: note = RNA
  misc_feature 9: note = DNA
  misc_feature 11: note = DNA
gcaggaagcactgagattcgt

SEQ ID NO: 531 - DNA, 21 bp, synthetic construct
  source 1..21: mol_type = other DNA
  modified_base 1: mod_base = OTHER; note = 2'-O-methylcytidine-3'-phosphorothioate
  modified_base 2: mod_base = OTHER; note = 2'-O-methyluridine-3'-phosphorothioate
  modified_base 3: mod_base = OTHER; note = 2'-O-methylcytidine-3'-phosphate
  modified_base 4: mod_base = OTHER; note = 2'-O-methylguanosine-3'-phosphate
  modified_base 5: mod_base = OTHER; note = 2'-O-methyladenosine-3'-phosphate
  modified_base 6: mod_base = OTHER; note = 2'-O-methylguanosine-3'-phosphate
  modified_base 7: mod_base = OTHER; note = 2'-O-methyladenosine-3'-phosphate
  modified_base 8: mod_base = OTHER; note = 2'-O-methyluridine-3'-phosphate
  modified_base 10: mod_base = OTHER; note = 2'-O-methylguanosine-3'-phosphate
  modified_base 12: mod_base = OTHER; note = 2'-O-methyluridine-3'-phosphate
  modified_base 13: mod_base = OTHER; note = 2'-O-methyluridine-3'-phosphate
  modified_base 14: mod_base = OTHER; note = 2'-O-methyladenosine-3'-phosphate
  modified_base 15: mod_base = OTHER; note = 2'-O-methylguanosine-3'-phosphate
  modified_base 16: mod_base = OTHER; note = 2'-O-methylcytidine-3'-phosphate
  modified_base 17: mod_base = OTHER; note = 2'-O-methylcytidine-3'-phosphate
  modified_base 18: mod_base = OTHER; note = 2'-O-methylguanosine-3'-phosphate
  modified_base 19: mod_base = OTHER; note = 2'-O-methylcytidine-3'-phosphate
  modified_base 20: mod_base = OTHER; note = 2'-O-methylguanosine-3'-phosphate
  modified_base 21: mod_base = OTHER; note = 2'-O-methyluridine-3'-phosphate ((2S,4R)-1-[29-[[2-(acetylamino)-2-deoxy-beta-D-galactopyra nosyl]oxy]-14,14-bis[[3-[[3-[[5-[[2-(acetylamino)-2-deoxy-b eta-D-galactopyranosyl]oxy]-1-oxopentyl]amino]propyl]amino] -3-oxopropoxy]methyl]-1,12,19,25-tetraoxo-16-oxa-13,20,24-t riazanonacos-1-yl]-4-hydroxy-2-pyrrolidinyl)methyl ester
  misc_feature 1..8: note = RNA
  misc_feature 10: note = RNA
  misc_feature 12..21: note = RNA
  misc_feature 9: note = DNA
  misc_feature 11: note = DNA
ctcgagatcgcttagccgcgt

SEQ ID NO: 532 - DNA, 21 bp, synthetic construct
  source 1..21: mol_type = other DNA
  modified_base 1: mod_base = OTHER; note = 2'-O-methylguanosine-3'-phosphorothioate
  modified_base 2: mod_base = OTHER; note = 2'-O-methylguanosine-3'-phosphorothioate
  modified_base 3: mod_base = OTHER; note = 2'-O-methyladenosine-3'-phosphate
  modified_base 4: mod_base = OTHER; note = 2'-O-methylguanosine-3'-phosphate
  modified_base 5: mod_base = OTHER; note = 2'-O-methyladenosine-3'-phosphate
  modified_base 6: mod_base = OTHER; note = 2'-O-methylcytidine-3'-phosphate
  modified_base 7: mod_base = OTHER; note = 2'-O-methyladenosine-3'-phosphate
  modified_base 8: mod_base = OTHER; note = 2'-O-methylcytidine-3'-phosphate
  modified_base 10: mod_base = OTHER; note = 2'-O-methyluridine-3'-phosphate
  modified_base 12: mod_base = OTHER; note = 2'-O-methylcytidine-3'-phosphate
  modified_base 13: mod_base = OTHER; note = 2'-O-methyladenosine-3'-phosphate
  modified_base 14: mod_base = OTHER; note = 2'-O-methyladenosine-3'-phosphate
  modified_base 15: mod_base = OTHER; note = 2'-O-methyluridine-3'-phosphate
  modified_base 16: mod_base = OTHER; note = 2'-O-methylguanosine-3'-phosphate
  modified_base 17: mod_base = OTHER; note = 2'-O-methylcytidine-3'-phosphate
  modified_base 18: mod_base = OTHER; note = 2'-O-methylcytidine-3'-phosphate
  modified_base 19: mod_base = OTHER; note = 2'-O-methyluridine-3'-phosphate
  modified_base 20: mod_base = OTHER; note = 2'-O-methylcytidine-3'-phosphate
  modified_base 21: mod_base = OTHER; note = 2'-O-methyluridine-3'-phosphate ((2S,4R)-1-[29-[[2-(acetylamino)-2-deoxy-beta-D-galactopyra nosyl]oxy]-14,14-bis[[3-[[3-[[5-[[2-(acetylamino)-2-deoxy-b eta-D-galactopyranosyl]oxy]-1-oxopentyl]amino]propyl]amino] -3-oxopropoxy]methyl]-1,12,19,25-tetraoxo-16-oxa-13,20,24-t riazanonacos-1-yl]-4-hydroxy-2-pyrrolidinyl)methyl ester
  misc_feature 1..8: note = RNA
  misc_feature 10: note = RNA
  misc_feature 12..21: note = RNA
  misc_feature 9: note = DNA
  misc_feature 11: note = DNA
ggagacaccttcaatgcctct

SEQ ID NO: 533 - DNA, 21 bp, synthetic construct
  source 1..21: mol_type = other DNA
  modified_base 1: mod_base = OTHER; note = 2'-O-methylcytidine-3'-phosphorothioate
  modified_base 2: mod_base = OTHER; note = 2'-O-methyluridine-3'-phosphorothioate
  modified_base 3: mod_base = OTHER; note = 2'-O-methyluridine-3'-phosphate
  modified_base 4: mod_base = OTHER; note = 2'-O-methyluridine-3'-phosphate
  modified_base 5: mod_base = OTHER; note = 2'-O-methylguanosine-3'-phosphate
  modified_base 6: mod_base = OTHER; note = 2'-O-methylcytidine-3'-phosphate
  modified_base 7: mod_base = OTHER; note = 2'-O-methyladenosine-3'-phosphate
  modified_base 8: mod_base = OTHER; note = 2'-O-methyluridine-3'-phosphate
  modified_base 10: mod_base = OTHER; note = 2'-O-methylcytidine-3'-phosphate
  modified_base 12: mod_base = OTHER; note = 2'-O-methylcytidine-3'-phosphate
  modified_base 13: mod_base = OTHER; note = 2'-O-methylguanosine-3'-phosphate
  modified_base 14: mod_base = OTHER; note = 2'-O-methyladenosine-3'-phosphate
  modified_base 15: mod_base = OTHER; note = 2'-O-methylguanosine-3'-phosphate
  modified_base 16: mod_base = OTHER; note = 2'-O-methyladenosine-3'-phosphate
  modified_base 17: mod_base = OTHER; note = 2'-O-methyluridine-3'-phosphate
  modified_base 18: mod_base = OTHER; note = 2'-O-methylcytidine-3'-phosphate
  modified_base 19: mod_base = OTHER; note = 2'-O-methylguanosine-3'-phosphate
  modified_base 20: mod_base = OTHER; note = 2'-O-methylcytidine-3'-phosphate
  modified_base 21: mod_base = OTHER; note = 2'-O-methyluridine-3'-phosphate ((2S,4R)-1-[29-[[2-(acetylamino)-2-deoxy-beta-D-galactopyra nosyl]oxy]-14,14-bis[[3-[[3-[[5-[[2-(acetylamino)-2-deoxy-b eta-D-galactopyranosyl]oxy]-1-oxopentyl]amino]propyl]amino] -3-oxopropoxy]methyl]-1,12,19,25-tetraoxo-16-oxa-13,20,24-t riazanonacos-1-yl]-4-hydroxy-2-pyrrolidinyl)methyl ester
  misc_feature 1..8: note = RNA
  misc_feature 10: note = RNA
  misc_feature 12..21: note = RNA
  misc_feature 9: note = DNA
  misc_feature 11: note = DNA
ctttgcattctcgagatcgct

SEQ ID NO: 534 - DNA, 21 bp, synthetic construct
  source 1..21: mol_type = other DNA
  modified_base 1: mod_base = OTHER; note = 2'-O-methyluridine-3'-phosphorothioate
  modified_base 2: mod_base = OTHER; note = 2'-O-methylguanosine-3'-phosphorothioate
  modified_base 3: mod_base = OTHER; note = 2'-O-methylguanosine-3'-phosphate
  modified_base 4: mod_base = OTHER; note = 2'-O-methyladenosine-3'-phosphate
  modified_base 5: mod_base = OTHER; note = 2'-O-methyluridine-3'-phosphate
  modified_base 6: mod_base = OTHER; note = 2'-O-methylcytidine-3'-phosphate
  modified_base 7: mod_base = OTHER; note = 2'-O-methylcytidine-3'-phosphate
  modified_base 8: mod_base = OTHER; note = 2'-O-methyladenosine-3'-phosphate
  modified_base 10: mod_base = OTHER; note = 2'-O-methyladenosine-3'-phosphate
  modified_base 12: mod_base = OTHER; note = 2'-O-methyluridine-3'-phosphate
  modified_base 13: mod_base = OTHER; note = 2'-O-methylguanosine-3'-phosphate
  modified_base 14: mod_base = OTHER; note = 2'-O-methyladenosine-3'-phosphate
  modified_base 15: mod_base = OTHER; note = 2'-O-methylguanosine-3'-phosphate
  modified_base 16: mod_base = OTHER; note = 2'-O-methylguanosine-3'-phosphate
  modified_base 17: mod_base = OTHER; note = 2'-O-methylguanosine-3'-phosphate
  modified_base 18: mod_base = OTHER; note = 2'-O-methylcytidine-3'-phosphate
  modified_base 19: mod_base = OTHER; note = 2'-O-methylcytidine-3'-phosphate
  modified_base 20: mod_base = OTHER; note = 2'-O-methylguanosine-3'-phosphate
  modified_base 21: mod_base = OTHER; note = 2'-O-methyluridine-3'-phosphate ((2S,4R)-1-[29-[[2-(acetylamino)-2-deoxy-beta-D-galactopyra nosyl]oxy]-14,14-bis[[3-[[3-[[5-[[2-(acetylamino)-2-deoxy-b eta-D-galactopyranosyl]oxy]-1-oxopentyl]amino]propyl]amino] -3-oxopropoxy]methyl]-1,12,19,25-tetraoxo-16-oxa-13,20,24-t riazanonacos-1-yl]-4-hydroxy-2-pyrrolidinyl)methyl ester
  misc_feature 1..8: note = RNA
  misc_feature 10: note = RNA
  misc_feature 12..21: note = RNA
  misc_feature 9: note = DNA
  misc_feature 11: note = DNA
tggatccacattgagggccgt

SEQ ID NO: 535 - DNA, 21 bp, synthetic construct
  source 1..21: mol_type = other DNA
  modified_base 1: mod_base = OTHER; note = 2'-O-methylcytidine-3'-phosphorothioate
  modified_base 2: mod_base = OTHER; note = 2'-O-methyluridine-3'-phosphorothioate
  modified_base 3: mod_base = OTHER; note = 2'-O-methylguanosine-3'-phosphate
  modified_base 4: mod_base = OTHER; note = 2'-O-methylcytidine-3'-phosphate
  modified_base 5: mod_base = OTHER; note = 2'-O-methylcytidine-3'-phosphate
  modified_base 6: mod_base = OTHER; note = 2'-O-methyladenosine-3'-phosphate
  modified_base 7: mod_base = OTHER; note = 2'-O-methylguanosine-3'-phosphate
  modified_base 8: mod_base = OTHER; note = 2'-O-methyladenosine-3'-phosphate
  modified_base 10: mod_base = OTHER; note = 2'-O-methylguanosine-3'-phosphate
  modified_base 12: mod_base = OTHER; note = 2'-O-methylguanosine-3'-phosphate
  modified_base 13: mod_base = OTHER; note = 2'-O-methyluridine-3'-phosphate
  modified_base 14: mod_base = OTHER; note = 2'-O-methylcytidine-3'-phosphate
  modified_base 15: mod_base = OTHER; note = 2'-O-methyluridine-3'-phosphate
  modified_base 16: mod_base = OTHER; note = 2'-O-methylguanosine-3'-phosphate
  modified_base 17: mod_base = OTHER; note = 2'-O-methylcytidine-3'-phosphate
  modified_base 18: mod_base = OTHER; note = 2'-O-methyluridine-3'-phosphate
  modified_base 19: mod_base = OTHER; note = 2'-O-methyladenosine-3'-phosphate
  modified_base 20: mod_base = OTHER; note = 2'-O-methylcytidine-3'-phosphate
  modified_base 21: mod_base = OTHER; note = 2'-O-methyladenosine-3'-phosphate ((2S,4R)-1-[29-[[2-(acetylamino)-2-deoxy-beta-D-galactopyra nosyl]oxy]-14,14-bis[[3-[[3-[[5-[[2-(acetylamino)-2-deoxy-b eta-D-galactopyranosyl]oxy]-1-oxopentyl]amino]propyl]amino] -3-oxopropoxy]methyl]-1,12,19,25-tetraoxo-16-oxa-13,20,24-t riazanonacos-1-yl]-4-hydroxy-2-pyrrolidinyl)methyl ester
  misc_feature 1..8: note = RNA
  misc_feature 10: note = RNA
  misc_feature 12..21: note = RNA
  misc_feature 9: note = DNA
  misc_feature 11: note = DNA
ctgccagatgtgtctgctaca

SEQ ID NO: 536 - DNA, 23 bp, synthetic construct
  source 1..23: mol_type = other DNA
  modified_base 1: mod_base = OTHER; note = 2'-O-methyladenosine-3'-phosphorothioate
  modified_base 2: mod_base = OTHER; note = 2'-deoxythymidine-3'-phosphorothioate
  modified_base 3: mod_base = OTHER; note = 2'-O-methylcytidine-3'-phosphate
  modified_base 4: mod_base = OTHER; note = 2'-O-methyluridine-3'-phosphate
  modified_base 6: mod_base = OTHER; note = 2'-O-methylguanosine-3'-phosphate
  modified_base 8: mod_base = OTHER; note = 2'-O-methylguanosine-3'-phosphate
  modified_base 9: mod_base = OTHER; note = 2'-O-methyladenosine-3'-phosphate
  modified_base 10: mod_base = OTHER; note = 2'-O-methyladenosine-3'-phosphate
  modified_base 11: mod_base = OTHER; note = 2'-O-methyluridine-3'-phosphate
  modified_base 13: mod_base = OTHER; note = 2'-O-methylcytidine-3'-phosphate
  modified_base 15: mod_base = OTHER; note = 2'-O-methyladenosine-3'-phosphate
  modified_base 16: mod_base = OTHER; note = 2'-O-methyladenosine-3'-phosphate
  modified_base 17: mod_base = OTHER; note = 2'-O-methylguanosine-3'-phosphate
  modified_base 18: mod_base = OTHER; note = 2'-O-methyladenosine-3'-phosphate
  modified_base 19: mod_base = OTHER; note = 2'-O-methylguanosine-3'-phosphate
  modified_base 20: mod_base = OTHER; note = 2'-O-methyladenosine-3'-phosphate
  modified_base 21: mod_base = OTHER; note = 2'-O-methyladenosine-3'-phosphorothioate
  modified_base 22: mod_base = OTHER; note = 2'-O-methyladenosine-3'-phosphorothioate
  modified_base 23: mod_base = OTHER; note = 2'-O-methyladenosine
  misc_feature 1: note = RNA
  misc_feature 3..4: note = RNA
  misc_feature 6: note = RNA
  misc_feature 8..11: note = RNA
  misc_feature 13: note = RNA
  misc_feature 15..23: note = RNA
  misc_feature 2: note = DNA
  misc_feature 5: note = DNA
  misc_feature 7: note = DNA
  misc_feature 12: note = DNA
  misc_feature 14: note = DNA
atctcgagaatgcaaagagaaaa

SEQ ID NO: 537 - DNA, 23 bp, synthetic construct
  source 1..23: mol_type = other DNA
  modified_base 1: mod_base = OTHER; note = 2'-O-methyladenosine-3'-phosphorothioate
  modified_base 2: mod_base = OTHER; note = 2'-deoxythymidine-3'-phosphorothioate
  modified_base 3: mod_base = OTHER; note = 2'-O-methyladenosine-3'-phosphate
  modified_base 4: mod_base = OTHER; note = 2'-O-methylguanosine-3'-phosphate
  modified_base 6: mod_base = OTHER; note = 2'-O-methylguanosine-3'-phosphate
  modified_base 8: mod_base = OTHER; note = 2'-O-methylcytidine-3'-phosphate
  modified_base 9: mod_base = OTHER; note = 2'-O-methyluridine-3'-phosphate
  modified_base 10: mod_base = OTHER; note = 2'-O-methylguanosine-3'-phosphate
  modified_base 11: mod_base = OTHER; note = 2'-O-methylcytidine-3'-phosphate
  modified_base 13: mod_base = OTHER; note = 2'-O-methylcytidine-3'-phosphate
  modified_base 15: mod_base = OTHER; note = 2'-O-methyladenosine-3'-phosphate
  modified_base 16: mod_base = OTHER; note = 2'-O-methylcytidine-3'-phosphate
  modified_base 17: mod_base = OTHER; note = 2'-O-methylguanosine-3'-phosphate
  modified_base 18: mod_base = OTHER; note = 2'-O-methylcytidine-3'-phosphate
  modified_base 19: mod_base = OTHER; note = 2'-O-methyladenosine-3'-phosphate
  modified_base 20: mod_base = OTHER; note = 2'-O-methylguanosine-3'-phosphate
  modified_base 21: mod_base = OTHER; note = 2'-O-methylguanosine-3'-phosphorothioate
  modified_base 22: mod_base = OTHER; note = 2'-O-methylguanosine-3'-phosphorothioate
  modified_base 23: mod_base = OTHER; note = 2'-O-methylcytidine
  misc_feature 1: note = RNA
  misc_feature 3..4: note = RNA
  misc_feature 6: note = RNA
  misc_feature 8..11: note = RNA
  misc_feature 13: note = RNA
  misc_feature 15..23: note = RNA
  misc_feature 2: note = DNA
  misc_feature 5: note = DNA
  misc_feature 7: note = DNA
  misc_feature 12: note = DNA
  misc_feature 14: note = DNA
atagagtctgcacaacgcagggc

SEQ ID NO: 538 - DNA, 23 bp, synthetic construct
  source 1..23: mol_type = other DNA
  modified_base 1: mod_base = OTHER; note = 2'-O-methyluridine-3'-phosphorothioate
  modified_base 2: mod_base = OTHER; note = 2'-deoxyadenosine-3'-phosphorothioate
  modified_base 3: mod_base = OTHER; note = 2'-O-methyladenosine-3'-phosphate
  modified_base 4: mod_base = OTHER; note = 2'-O-methyladenosine-3'-phosphate
  modified_base 6: mod_base = OTHER; note = 2'-O-methylcytidine-3'-phosphate
  modified_base 8: mod_base = OTHER; note = 2'-O-methylcytidine-3'-phosphate
  modified_base 9: mod_base = OTHER; note = 2'-O-methylguanosine-3'-phosphate
  modified_base 10: mod_base = OTHER; note = 2'-O-methylguanosine-3'-phosphate
  modified_base 11: mod_base = OTHER; note = 2'-O-methylcytidine-3'-phosphate
  modified_base 13: mod_base = OTHER; note = 2'-O-methyladenosine-3'-phosphate
  modified_base 15: mod_base = OTHER; note = 2'-O-methylguanosine-3'-phosphate
  modified_base 16: mod_base = OTHER; note = 2'-O-methylcytidine-3'-phosphate
  modified_base 17: mod_base = OTHER; note = 2'-O-methylguanosine-3'-phosphate
  modified_base 18: mod_base = OTHER; note = 2'-O-methyladenosine-3'-phosphate
  modified_base 19: mod_base = OTHER; note = 2'-O-methyluridine-3'-phosphate
  modified_base 20: mod_base = OTHER; note = 2'-O-methylcytidine-3'-phosphate
  modified_base 21: mod_base = OTHER; note = 2'-O-methyluridine-3'-phosphorothioate
  modified_base 22: mod_base = OTHER; note = 2'-O-methylcytidine-3'-phosphorothioate
  modified_base 23: mod_base = OTHER; note = 2'-O-methylguanosine
  misc_feature 1: note = RNA
  misc_feature 3..4: note = RNA
  misc_feature 6: note = RNA
  misc_feature 8..11: note = RNA
  misc_feature 13: note = RNA
  misc_feature 15..23: note = RNA
  misc_feature 2: note = DNA
  misc_feature 5: note = DNA
  misc_feature 7: note = DNA
  misc_feature 12: note = DNA
  misc_feature 14: note = DNA
taaagcgcggctaagcgatctcg

SEQ ID NO: 539 - DNA, 23 bp, synthetic construct
  source 1..23: mol_type = other DNA
  modified_base 1: mod_base = OTHER; note = 2'-O-methyluridine-3'-phosphorothioate
  modified_base 2: mod_base = OTHER; note = 2'-deoxycytidine-3'-phosphorothioate
  modified_base 3: mod_base = OTHER; note = 2'-O-methyluridine-3'-phosphate
  modified_base 4: mod_base = OTHER; note = 2'-O-methylcytidine-3'-phosphate
  modified_base 6: mod_base = OTHER; note = 2'-O-methyladenosine-3'-phosphate
  modified_base 8: mod_base = OTHER; note = 2'-O-methyladenosine-3'-phosphate
  modified_base 9: mod_base = OTHER; note = 2'-O-methyladenosine-3'-phosphate
  modified_base 10: mod_base = OTHER; note = 2'-O-methyluridine-3'-phosphate
  modified_base 11: mod_base = OTHER; note = 2'-O-methylguanosine-3'-phosphate
  modified_base 13: mod_base = OTHER; note = 2'-O-methyladenosine-3'-phosphate
  modified_base 15: mod_base = OTHER; note = 2'-O-methyladenosine-3'-phosphate
  modified_base 16: mod_base = OTHER; note = 2'-O-methylguanosine-3'-phosphate
  modified_base 17: mod_base = OTHER; note = 2'-O-methyladenosine-3'-phosphate
  modified_base 18: mod_base = OTHER; note = 2'-O-methylguanosine-3'-phosphate
  modified_base 19: mod_base = OTHER; note = 2'-O-methyladenosine-3'-phosphate
  modified_base 20: mod_base = OTHER; note = 2'-O-methyladenosine-3'-phosphate
  modified_base 21: mod_base = OTHER; note = 2'-O-methyladenosine-3'-phosphorothioate
  modified_base 22: mod_base = OTHER; note = 2'-O-methyladenosine-3'-phosphorothioate
  modified_base 23: mod_base = OTHER; note = 2'-O-methyluridine
  misc_feature 1: note = RNA
  misc_feature 3..4: note = RNA
  misc_feature 6: note = RNA
  misc_feature 8..11: note = RNA
  misc_feature 13: note = RNA
  misc_feature 15..23: note = RNA
  misc_feature 2: note = DNA
  misc_feature 5: note = DNA
  misc_feature 7: note = DNA
  misc_feature 12: note = DNA
  misc_feature 14: note = DNA
tctcgagaatgcaaagagaaaat

SEQ ID NO: 540 - DNA, 23 bp, synthetic construct
  source 1..23: mol_type = other DNA
  modified_base 1: mod_base = OTHER; note = 2'-O-methyluridine-3'-phosphorothioate
  modified_base 2: mod_base = OTHER; note = 2'-deoxycytidine-3'-phosphorothioate
  modified_base 3: mod_base = OTHER; note = 2'-O-methylguanosine-3'-phosphate
  modified_base 4: mod_base = OTHER; note = 2'-O-methylcytidine-3'-phosphate
  modified_base 6: mod_base = OTHER; note = 2'-O-methyluridine-3'-phosphate
  modified_base 8: mod_base = OTHER; note = 2'-O-methyluridine-3'-phosphate
  modified_base 9: mod_base = OTHER; note = 2'-O-methylcytidine-3'-phosphate
  modified_base 10: mod_base = OTHER; note = 2'-O-methyladenosine-3'-phosphate
  modified_base 11: mod_base = OTHER; note = 2'-O-methylguanosine-3'-phosphate
  modified_base 13: mod_base = OTHER; note = 2'-O-methyluridine-3'-phosphate
  modified_base 15: mod_base = OTHER; note = 2'-O-methylguanosine-3'-phosphate
  modified_base 16: mod_base = OTHER; note = 2'-O-methyladenosine-3'-phosphate
  modified_base 17: mod_base = OTHER; note = 2'-O-methylcytidine-3'-phosphate
  modified_base 18: mod_base = OTHER; note = 2'-O-methyluridine-3'-phosphate
  modified_base 19: mod_base = OTHER; note = 2'-O-methylcytidine-3'-phosphate
  modified_base 20: mod_base = OTHER; note = 2'-O-methyladenosine-3'-phosphate
  modified_base 21: mod_base = OTHER; note = 2'-O-methylcytidine-3'-phosphorothioate
  modified_base 22: mod_base = OTHER; note = 2'-O-methyladenosine-3'-phosphorothioate
  modified_base 23: mod_base = OTHER; note = 2'-O-methylguanosine
  misc_feature 1: note = RNA
  misc_feature 3..4: note = RNA
  misc_feature 6: note = RNA
  misc_feature 8..11: note = RNA
  misc_feature 13: note = RNA
  misc_feature 15..23: note = RNA
  misc_feature 2: note = DNA
  misc_feature 5: note = DNA
  misc_feature 7: note = DNA
  misc_feature 12: note = DNA
  misc_feature 14: note = DNA
tcgcttgtcagatggactcacag

SEQ ID NO: 541 - DNA, 23 bp, synthetic construct
  source 1..23: mol_type = other DNA
  modified_base 1: mod_base = OTHER; note = 2'-O-methyladenosine-3'-phosphorothioate
  modified_base 2: mod_base = OTHER; note = 2'-deoxyguanosine-3'-phosphorothioate
  modified_base 3: mod_base = OTHER; note = 2'-O-methyladenosine-3'-phosphate
  modified_base 4: mod_base = OTHER; note = 2'-O-methylguanosine-3'-phosphate
  modified_base 6: mod_base = OTHER; note = 2'-O-methyladenosine-3'-phosphate
  modified_base 8: mod_base = OTHER; note = 2'-O-methylguanosine-3'-phosphate
  modified_base 9: mod_base = OTHER; note = 2'-O-methylguanosine-3'-phosphate
  modified_base 10: mod_base = OTHER; note = 2'-O-methyluridine-3'-phosphate
  modified_base 11: mod_base = OTHER; note = 2'-O-methylguanosine-3'-phosphate
  modified_base 13: mod_base = OTHER; note = 2'-O-methyladenosine-3'-phosphate
  modified_base 15: mod_base = OTHER; note = 2'-O-methylguanosine-3'-phosphate
  modified_base 16: mod_base = OTHER; note = 2'-O-methyladenosine-3'-phosphate
  modified_base 17: mod_base = OTHER; note = 2'-O-methylguanosine-3'-phosphate
  modified_base 18: mod_base = OTHER; note = 2'-O-methyluridine-3'-phosphate
  modified_base 19: mod_base = OTHER; note = 2'-O-methyluridine-3'-phosphate
  modified_base 20: mod_base = OTHER; note = 2'-O-methylguanosine-3'-phosphate
  modified_base 21: mod_base = OTHER; note = 2'-O-methylguanosine-3'-phosphorothioate
  modified_base 22: mod_base = OTHER; note = 2'-O-methyladenosine-3'-phosphorothioate
  modified_base 23: mod_base = OTHER; note = 2'-O-methylcytidine
  misc_feature 1: note = RNA
  misc_feature 3..4: note = RNA
  misc_feature 6: note = RNA
  misc_feature 8..11: note = RNA
  misc_feature 13: note = RNA
  misc_feature 15..23: note = RNA
  misc_feature 2: note = DNA
  misc_feature 5: note = DNA
  misc_feature 7: note = DNA
  misc_feature 12: note = DNA
  misc_feature 14: note = DNA
agagaacggtgcaggagttggac

SEQ ID NO: 542 - DNA, 23 bp, synthetic construct
  source 1..23: mol_type = other DNA
  modified_base 1: mod_base = OTHER; note = 2'-O-methyluridine-3'-phosphorothioate
  modified_base 2: mod_base = OTHER; note = 2'-deoxythymidine-3'-phosphorothioate
  modified_base 3: mod_base = OTHER; note = 2'-O-methylcytidine-3'-phosphate
  modified_base 4: mod_base = OTHER; note = 2'-O-methylcytidine-3'-phosphate
  modified_base 6: mod_base = OTHER; note = 2'-O-methylcytidine-3'-phosphate
  modified_base 8: mod_base = OTHER; note = 2'-O-methylcytidine-3'-phosphate
  modified_base 9: mod_base = OTHER; note = 2'-O-methyladenosine-3'-phosphate
  modified_base 10: mod_base = OTHER; note = 2'-O-methylcytidine-3'-phosphate
  modified_base 11: mod_base = OTHER; note = 2'-O-methylguanosine-3'-phosphate
  modified_base 13: mod_base = OTHER; note = 2'-O-methylcytidine-3'-phosphate
  modified_base 15: mod_base = OTHER; note = 2'-O-methyladenosine-3'-phosphate
  modified_base 16: mod_base = OTHER; note = 2'-O-methyluridine-3'-phosphate
  modified_base 17: mod_base = OTHER; note = 2'-O-methyladenosine-3'-phosphate
  modified_base 18: mod_base = OTHER; note = 2'-O-methylcytidine-3'-phosphate
  modified_base 19: mod_base = OTHER; note = 2'-O-methyladenosine-3'-phosphate
  modified_base 20: mod_base = OTHER; note = 2'-O-methyladenosine-3'-phosphate
  modified_base 21: mod_base = OTHER; note = 2'-O-methylguanosine-3'-phosphorothioate
  modified_base 22: mod_base = OTHER; note = 2'-O-methylcytidine-3'-phosphorothioate
  modified_base 23: mod_base = OTHER; note = 2'-O-methylcytidine
  misc_feature 1: note = RNA
  misc_feature 3..4: note = RNA
  misc_feature 6: note = RNA
  misc_feature 8..11: note = RNA
  misc_feature 13: note = RNA
  misc_feature 15..23: note = RNA
  misc_feature 2: note = DNA
  misc_feature 5: note = DNA
  misc_feature 7: note = DNA
  misc_feature 12: note = DNA
  misc_feature 14: note = DNA
ttcctcacacgaccatacaagcc

SEQ ID NO: 543 - DNA, 23 bp, synthetic construct
  source 1..23: mol_type = other DNA
  modified_base 1: mod_base = OTHER; note = 2'-O-methyluridine-3'-phosphorothioate
  modified_base 2: mod_base = OTHER; note = 2'-deoxythymidine-3'-phosphorothioate
  modified_base 3: mod_base = OTHER; note = 2'-O-methylcytidine-3'-phosphate
  modified_base 4: mod_base = OTHER; note = 2'-O-methylcytidine-3'-phosphate
  modified_base 6: mod_base = OTHER; note = 2'-O-methylguanosine-3'-phosphate
  modified_base 8: mod_base = OTHER; note = 2'-O-methylcytidine-3'-phosphate
  modified_base 9: mod_base = OTHER; note = 2'-O-methylcytidine-3'-phosphate
  modified_base 10: mod_base = OTHER; note = 2'-O-methyluridine-3'-phosphate
  modified_base 11: mod_base = OTHER; note = 2'-O-methylcytidine-3'-phosphate
  modified_base 13: mod_base = OTHER; note = 2'-O-methyladenosine-3'-phosphate
  modified_base 15: mod_base = OTHER; note = 2'-O-methylguanosine-3'-phosphate
  modified_base 16: mod_base = OTHER; note = 2'-O-methyluridine-3'-phosphate
  modified_base 17: mod_base = OTHER; note = 2'-O-methylguanosine-3'-phosphate
  modified_base 18: mod_base = OTHER; note = 2'-O-methylguanosine-3'-phosphate
  modified_base 19: mod_base = OTHER; note = 2'-O-methyladenosine-3'-phosphate
  modified_base 20: mod_base = OTHER; note = 2'-O-methyluridine-3'-phosphate
  modified_base 21: mod_base = OTHER; note = 2'-O-methylcytidine-3'-phosphorothioate
  modified_base 22: mod_base = OTHER; note = 2'-O-methylcytidine-3'-phosphorothioate
  modified_base 23: mod_base = OTHER; note = 2'-O-methyladenosine
  misc_feature 1: note = RNA
  misc_feature 3..4: note = RNA
  misc_feature 6: note = RNA
  misc_feature 8..11: note = RNA
  misc_feature 13: note = RNA
  misc_feature 15..23: note = RNA
  misc_feature 2: note = DNA
  misc_feature 5: note = DNA
  misc_feature 7: note = DNA
  misc_feature 12: note = DNA
  misc_feature 14: note = DNA
ttccggccctcaatgtggatcca

SEQ ID NO: 544 - DNA, 23 bp, synthetic construct
  source 1..23: mol_type = other DNA
  modified_base 1: mod_base = OTHER; note = 2'-O-methyladenosine-3'-phosphorothioate
  modified_base 2: mod_base = OTHER; note = 2'-deoxycytidine-3'-phosphorothioate
  modified_base 3: mod_base = OTHER; note = 2'-O-methylguanosine-3'-phosphate
  modified_base 4: mod_base = OTHER; note = 2'-O-methyluridine-3'-phosphate
  modified_base 6: mod_base = OTHER; note = 2'-O-methyluridine-3'-phosphate
  modified_base 8: mod_base = OTHER; note = 2'-O-methylcytidine-3'-phosphate
  modified_base 9: mod_base = OTHER; note = 2'-O-methylguanosine-3'-phosphate
  modified_base 10: mod_base = OTHER; note = 2'-O-methyluridine-3'-phosphate
  modified_base 11: mod_base = OTHER; note = 2'-O-methyladenosine-3'-phosphate
  modified_base 13: mod_base = OTHER; note = 2'-O-methylcytidine-3'-phosphate
  modified_base 15: mod_base = OTHER; note = 2'-O-methyladenosine-3'-phosphate
  modified_base 16: mod_base = OTHER; note = 2'-O-methyladenosine-3'-phosphate
  modified_base 17: mod_base = OTHER; note = 2'-O-methyladenosine-3'-phosphate
  modified_base 18: mod_base = OTHER; note = 2'-O-methylcytidine-3'-phosphate
  modified_base 19: mod_base = OTHER; note = 2'-O-methyladenosine-3'-phosphate
  modified_base 20: mod_base = OTHER; note = 2'-O-methylguanosine-3'-phosphate
  modified_base 21: mod_base = OTHER; note = 2'-O-methylcytidine-3'-phosphorothioate
  modified_base 22: mod_base = OTHER; note = 2'-O-methyluridine-3'-phosphorothioate
  modified_base 23: mod_base = OTHER; note = 2'-O-methylguanosine
  misc_feature 1: note = RNA
  misc_feature 3..4: note = RNA
  misc_feature 6: note = RNA
  misc_feature 8..11: note = RNA
  misc_feature 13: note = RNA
  misc_feature 15..23: note = RNA
  misc_feature 2: note = DNA
  misc_feature 5: note = DNA
  misc_feature 7: note = DNA
  misc_feature 12: note = DNA
  misc_feature 14: note = DNA
acgtctccgtagccaaacagctg

SEQ ID NO: 545 - DNA, 23 bp, synthetic construct
  source 1..23: mol_type = other DNA
  modified_base 1: mod_base = OTHER; note = 2'-O-methyladenosine-3'-phosphorothioate
  modified_base 2: mod_base = OTHER; note = 2'-deoxythymidine-3'-phosphorothioate
  modified_base 3: mod_base = OTHER; note = 2'-O-methylguanosine-3'-phosphate
  modified_base 4: mod_base = OTHER; note = 2'-O-methylcytidine-3'-phosphate
  modified_base 6: mod_base = OTHER; note = 2'-O-methylguanosine-3'-phosphate
  modified_base 8: mod_base = OTHER; note = 2'-O-methyluridine-3'-phosphate
  modified_base 9: mod_base = OTHER; note = 2'-O-methyladenosine-3'-phosphate
  modified_base 10: mod_base = OTHER; note = 2'-O-methyladenosine-3'-phosphate
  modified_base 11: mod_base = OTHER; note = 2'-O-methyluridine-3'-phosphate
  modified_base 13: mod_base = OTHER; note = 2'-O-methyladenosine-3'-phosphate
  modified_base 15: mod_base = OTHER; note = 2'-O-methyladenosine-3'-phosphate
  modified_base 16: mod_base = OTHER; note = 2'-O-methyluridine-3'-phosphate
  modified_base 17: mod_base = OTHER; note = 2'-O-methylguanosine-3'-phosphate
  modified_base 18: mod_base = OTHER; note = 2'-O-methylguanosine-3'-phosphate
  modified_base 19: mod_base = OTHER; note = 2'-O-methylcytidine-3'-phosphate
  modified_base 20: mod_base = OTHER; note = 2'-O-methyladenosine-3'-phosphate
  modified_base 21: mod_base = OTHER; note = 2'-O-methylguanosine-3'-phosphorothioate
  modified_base 22: mod_base = OTHER; note = 2'-O-methyladenosine-3'-phosphorothioate
  modified_base 23: mod_base = OTHER; note = 2'-O-methyluridine
  misc_feature 1: note = RNA
  misc_feature 3..4: note = RNA
  misc_feature 6: note = RNA
  misc_feature 8..11: note = RNA
  misc_feature 13: note = RNA
  misc_feature 15..23: note = RNA
  misc_feature 2: note = DNA
  misc_feature 5: note = DNA
  misc_feature 7: note = DNA
  misc_feature 12: note = DNA
  misc_feature 14: note = DNA
atgcagctaattaaatggcagat

SEQ ID NO: 546 - DNA, 23 bp, synthetic construct
  source 1..23: mol_type = other DNA
  modified_base 1: mod_base = OTHER; note = 2'-O-methyladenosine-3'-phosphorothioate
  modified_base 2: mod_base = OTHER; note = 2'-deoxyadenosine-3'-phosphorothioate
  modified_base 3: mod_base = OTHER; note = 2'-O-methylcytidine-3'-phosphate
  modified_base 4: mod_base = OTHER; note = 2'-O-methylguanosine-3'-phosphate
  modified_base 6: mod_base = OTHER; note = 2'-O-methyladenosine-3'-phosphate
  modified_base 8: mod_base = OTHER; note = 2'-O-methyladenosine-3'-phosphate
  modified_base 9: mod_base = OTHER; note = 2'-O-methylguanosine-3'-phosphate
  modified_base 10: mod_base = OTHER; note = 2'-O-methylguanosine-3'-phosphate
  modified_base 11: mod_base = OTHER; note = 2'-O-methyladenosine-3'-phosphate
  modified_base 13: mod_base = OTHER; note = 2'-O-methylcytidine-3'-phosphate
  modified_base 15: mod_base = OTHER; note = 2'-O-methylguanosine-3'-phosphate
  modified_base 16: mod_base = OTHER; note = 2'-O-methylcytidine-3'-phosphate
  modified_base 17: mod_base = OTHER; note = 2'-O-methyluridine-3'-phosphate
  modified_base 18: mod_base = OTHER; note = 2'-O-methyluridine-3'-phosphate
  modified_base 19: mod_base = OTHER; note = 2'-O-methylcytidine-3'-phosphate
  modified_base 20: mod_base = OTHER; note = 2'-O-methyluridine-3'-phosphate
  modified_base 21: mod_base = OTHER; note = 2'-O-methylcytidine-3'-phosphorothioate
  modified_base 22: mod_base = OTHER; note = 2'-O-methyluridine-3'-phosphorothioate
  modified_base 23: mod_base = OTHER; note = 2'-O-methyluridine
  misc_feature 1: note = RNA
  misc_feature 3..4: note = RNA
  misc_feature 6: note = RNA
  misc_feature 8..11: note = RNA
  misc_feature 13: note = RNA
  misc_feature 15..23: note = RNA
  misc_feature 2: note = DNA
  misc_feature 5: note = DNA
  misc_feature 7: note = DNA
  misc_feature 12: note = DNA
  misc_feature 14: note = DNA
aacgcacaggatctgcttctctt

SEQ ID NO: 547 - DNA, 23 bp, synthetic construct
  source 1..23: mol_type = other DNA
  modified_base 1: mod_base = OTHER; note = 2'-O-methyladenosine-3'-phosphorothioate
  modified_base 2: mod_base = OTHER; note = 2'-deoxythymidine-3'-phosphorothioate
  modified_base 3: mod_base = OTHER; note = 2'-O-methylcytidine-3'-phosphate
  modified_base 4: mod_base = OTHER; note = 2'-O-methylguanosine-3'-phosphate
  modified_base 6: mod_base = OTHER; note = 2'-O-methyluridine-3'-phosphate
  modified_base 8: mod_base = OTHER; note = 2'-O-methylguanosine-3'-phosphate
  modified_base 9: mod_base = OTHER; note = 2'-O-methyluridine-3'-phosphate
  modified_base 10: mod_base = OTHER; note = 2'-O-methylcytidine-3'-phosphate
  modified_base 11: mod_base = OTHER; note = 2'-O-methyladenosine-3'-phosphate
  modified_base 13: mod_base = OTHER; note = 2'-O-methyladenosine-3'-phosphate
  modified_base 15: mod_base = OTHER; note = 2'-O-methylguanosine-3'-phosphate
  modified_base 16: mod_base = OTHER; note = 2'-O-methylguanosine-3'-phosphate
  modified_base 17: mod_base = OTHER; note = 2'-O-methyladenosine-3'-phosphate
  modified_base 18: mod_base = OTHER; note = 2'-O-methylcytidine-3'-phosphate
  modified_base 19: mod_base = OTHER; note = 2'-O-methyluridine-3'-phosphate
  modified_base 20: mod_base = OTHER; note = 2'-O-methylcytidine-3'-phosphate
  modified_base 21: mod_base = OTHER; note = 2'-O-methyladenosine-3'-phosphorothioate
  modified_base 22: mod_base = OTHER; note = 2'-O-methylcytidine-3'-phosphorothioate
  modified_base 23: mod_base = OTHER; note = 2'-O-methyladenosine
  misc_feature 1: note = RNA
  misc_feature 3..4: note = RNA
  misc_feature 6: note = RNA
  misc_feature 8..11: note = RNA
  misc_feature 13: note = RNA
  misc_feature 15..23: note = RNA
  misc_feature 2: note = DNA
  misc_feature 5: note = DNA
  misc_feature 7: note = DNA
  misc_feature 12: note = DNA
  misc_feature 14: note = DNA
atcgcttgtcagatggactcaca

SEQ ID NO: 548 - DNA, 23 bp, synthetic construct
  source 1..23: mol_type = other DNA
  modified_base 1: mod_base = OTHER; note = 2'-O-methyladenosine-3'-phosphorothioate
  modified_base 2: mod_base = OTHER; note = 2'-deoxyguanosine-3'-phosphorothioate
  modified_base 3: mod_base = OTHER; note = 2'-O-methylcytidine-3'-phosphate
  modified_base 4: mod_base = OTHER; note = 2'-O-methyluridine-3'-phosphate
  modified_base 6: mod_base = OTHER; note = 2'-O-methyladenosine-3'-phosphate
  modified_base 8: mod_base = OTHER; note = 2'-O-methylcytidine-3'-phosphate
  modified_base 9: mod_base = OTHER; note = 2'-O-methylguanosine-3'-phosphate
  modified_base 10: mod_base = OTHER; note = 2'-O-methyladenosine-3'-phosphate
  modified_base 11: mod_base = OTHER; note = 2'-O-methyluridine-3'-phosphate
  modified_base 13: mod_base = OTHER; note = 2'-O-methyluridine-3'-phosphate
  modified_base 15: mod_base = OTHER; note = 2'-O-methylguanosine-3'-phosphate
  modified_base 16: mod_base = OTHER; note = 2'-O-methyladenosine-3'-phosphate
  modified_base 17: mod_base = OTHER; note = 2'-O-methylguanosine-3'-phosphate
  modified_base 18: mod_base = OTHER; note = 2'-O-methyladenosine-3'-phosphate
  modified_base 19: mod_base = OTHER; note = 2'-O-methyladenosine-3'-phosphate
  modified_base 20: mod_base = OTHER; note = 2'-O-methyluridine-3'-phosphate
  modified_base 21: mod_base = OTHER; note = 2'-O-methylguanosine-3'-phosphorothioate
  modified_base 22: mod_base = OTHER; note = 2'-O-methylcytidine-3'-phosphorothioate
  modified_base 23: mod_base = OTHER; note = 2'-O-methyladenosine
  misc_feature 1: note = RNA
  misc_feature 3..4: note = RNA
  misc_feature 6: note = RNA
  misc_feature 8..11: note = RNA
  misc_feature 13: note = RNA
  misc_feature 15..23: note = RNA
  misc_feature 2: note = DNA
  misc_feature 5: note = DNA
  misc_feature 7: note = DNA
  misc_feature 12: note = DNA
  misc_feature 14: note = DNA
agctaagcgatctcgagaatgca

SEQ ID NO: 549 - DNA, 23 bp, synthetic construct
  source 1..23: mol_type = other DNA
  modified_base 1: mod_base = OTHER; note = 2'-O-methyladenosine-3'-phosphorothioate
  modified_base 2: mod_base = OTHER; note = 2'-deoxycytidine-3'-phosphorothioate
  modified_base 3: mod_base = OTHER; note = 2'-O-methyluridine-3'-phosphate
  modified_base 4: mod_base = OTHER; note = 2'-O-methylcytidine-3'-phosphate
  modified_base 6: mod_base = OTHER; note = 2'-O-methylcytidine-3'-phosphate
  modified_base 8: mod_base = OTHER; note = 2'-O-methyluridine-3'-phosphate
  modified_base 9: mod_base = OTHER; note = 2'-O-methylguanosine-3'-phosphate
  modified_base 10: mod_base = OTHER; note = 2'-O-methyluridine-3'-phosphate
  modified_base 11: mod_base = OTHER; note = 2'-O-methylcytidine-3'-phosphate
  modified_base 13: mod_base = OTHER; note = 2'-O-methylguanosine-3'-phosphate
  modified_base 15: mod_base = OTHER; note = 2'-O-methyluridine-3'-phosphate
  modified_base 16: mod_base = OTHER; note = 2'-O-methylguanosine-3'-phosphate
  modified_base 17: mod_base = OTHER; note = 2'-O-methylguanosine-3'-phosphate
  modified_base 18: mod_base = OTHER; note = 2'-O-methyladenosine-3'-phosphate
  modified_base 19: mod_base = OTHER; note = 2'-O-methylcytidine-3'-phosphate
  modified_base 20: mod_base = OTHER; note = 2'-O-methyluridine-3'-phosphate
  modified_base 21: mod_base = OTHER; note = 2'-O-methylcytidine-3'-phosphorothioate
  modified_base 22: mod_base = OTHER; note = 2'-O-methyladenosine-3'-phosphorothioate
  modified_base 23: mod_base = OTHER; note = 2'-O-methylcytidine
  misc_feature 1: note = RNA
  misc_feature 3..4: note = RNA
  misc_feature 6: note = RNA
  misc_feature 8..11: note = RNA
  misc_feature 13: note = RNA
  misc_feature 15..23: note = RNA
  misc_feature 2: note = DNA
  misc_feature 5: note = DNA
  misc_feature 7: note = DNA
  misc_feature 12: note = DNA
  misc_feature 14: note = DNA
actcgcttgtcagatggactcac

SEQ ID NO: 550 - DNA, 23 bp, synthetic construct
  source 1..23: mol_type = other DNA
  modified_base 1: mod_base = OTHER; note = 2'-O-methyladenosine-3'-phosphorothioate
  modified_base 2: mod_base = OTHER; note = 2'-deoxythymidine-3'-phosphorothioate
  modified_base 3: mod_base = OTHER; note = 2'-O-methylcytidine-3'-phosphate
  modified_base 4: mod_base = OTHER; note = 2'-O-methyluridine-3'-phosphate
  modified_base 6: mod_base = OTHER; note = 2'-O-methyluridine-3'-phosphate
  modified_base 8: mod_base = OTHER; note = 2'-O-methylcytidine-3'-phosphate
  modified_base 9: mod_base = OTHER; note = 2'-O-methylguanosine-3'-phosphate
  modified_base 10: mod_base = OTHER; note = 2'-O-methylcytidine-3'-phosphate
  modified_base 11: mod_base = OTHER; note = 2'-O-methyluridine-3'-phosphate
  modified_base 13: mod_base = OTHER; note = 2'-O-methylcytidine-3'-phosphate
  modified_base 15: mod_base = OTHER; note = 2'-O-methylguanosine-3'-phosphate
  modified_base 16: mod_base = OTHER; note = 2'-O-methylcytidine-3'-phosphate
  modified_base 17: mod_base = OTHER; note = 2'-O-methyladenosine-3'-phosphate
  modified_base 18: mod_base = OTHER; note = 2'-O-methyluridine-3'-phosphate
  modified_base 19: mod_base = OTHER; note = 2'-O-methylcytidine-3'-phosphate
  modified_base 20: mod_base = OTHER; note = 2'-O-methyluridine-3'-phosphate
  modified_base 21: mod_base = OTHER; note = 2'-O-methyluridine-3'-phosphorothioate
  modified_base 22: mod_base = OTHER; note = 2'-O-methylcytidine-3'-phosphorothioate
  modified_base 23: mod_base = OTHER; note = 2'-O-methyladenosine
  misc_feature 1: note = RNA
  misc_feature 3..4: note = RNA
  misc_feature 6: note = RNA
  misc_feature 8..11: note = RNA
  misc_feature 13: note = RNA
  misc_feature 15..23: note = RNA
  misc_feature 2: note = DNA
  misc_feature 5: note = DNA
  misc_feature 7: note = DNA
  misc_feature 12: note = DNA
  misc_feature 14: note = DNA
atctatccgctgcagcatcttca

SEQ ID NO: 551 - DNA, 23 bp, synthetic construct
  source 1..23: mol_type = other DNA
  modified_base 1: mod_base = OTHER; note = 2'-O-methyladenosine-3'-phosphorothioate
  modified_base 2: mod_base = OTHER; note = 2'-deoxyguanosine-3'-phosphorothioate
  modified_base 3: mod_base = OTHER; note = 2'-O-methylguanosine-3'-phosphate
  modified_base 4: mod_base = OTHER; note = 2'-O-methylcytidine-3'-phosphate
  modified_base 6: mod_base = OTHER; note = 2'-O-methyladenosine-3'-phosphate
  modified_base 8: mod_base = OTHER; note = 2'-O-methylguanosine-3'-phosphate
  modified_base 9: mod_base = OTHER; note = 2'-O-methylcytidine-3'-phosphate
  modified_base 10: mod_base = OTHER; note = 2'-O-methylguanosine-3'-phosphate
  modified_base 11: mod_base = OTHER; note = 2'-O-methyladenosine-3'-phosphate
  modified_base 13: mod_base = OTHER; note = 2'-O-methylcytidine-3'-phosphate
  modified_base 15: mod_base = OTHER; note = 2'-O-methylcytidine-3'-phosphate
  modified_base 16: mod_base = OTHER; note = 2'-O-methylguanosine-3'-phosphate
  modified_base 17: mod_base = OTHER; note = 2'-O-methyladenosine-3'-phosphate
  modified_base 18: mod_base = OTHER; note = 2'-O-methylguanosine-3'-phosphate
  modified_base 19: mod_base = OTHER; note = 2'-O-methyladenosine-3'-phosphate
  modified_base 20: mod_base = OTHER; note = 2'-O-methyladenosine-3'-phosphate
  modified_base 21: mod_base = OTHER; note = 2'-O-methyluridine-3'-phosphorothioate
  modified_base 22: mod_base = OTHER; note = 2'-O-methylguanosine-3'-phosphorothioate
  modified_base 23: mod_base = OTHER; note = 2'-O-methylcytidine
  misc_feature 1: note = RNA
  misc_feature 3..4: note = RNA
  misc_feature 6: note = RNA
  misc_feature 8..11: note = RNA
  misc_feature 13: note = RNA
  misc_feature 15..23: note = RNA
  misc_feature 2: note = DNA
  misc_feature 5: note = DNA
  misc_feature 7: note = DNA
  misc_feature 12: note = DNA
  misc_feature 14: note = DNA
aggctaagcgatctcgagaatgc

SEQ ID NO: 552 - DNA, 23 bp, synthetic construct
  source 1..23: mol_type = other DNA
  modified_base 1: mod_base = OTHER; note = 2'-O-methyladenosine-3'-phosphorothioate
  modified_base 2: mod_base = OTHER; note = 2'-deoxyadenosine-3'-phosphorothioate
  modified_base 3: mod_base = OTHER; note = 2'-O-methyladenosine-3'-phosphate
  modified_base 4: mod_base = OTHER; note = 2'-O-methylcytidine-3'-phosphate
  modified_base 6: mod_base = OTHER; note = 2'-O-methylcytidine-3'-phosphate
  modified_base 8: mod_base = OTHER; note = 2'-O-methyluridine-3'-phosphate
  modified_base 9: mod_base = OTHER; note = 2'-O-methylcytidine-3'-phosphate
  modified_base 10: mod_base = OTHER; note = 2'-O-methylcytidine-3'-phosphate
  modified_base 11: mod_base = OTHER; note = 2'-O-methylcytidine-3'-phosphate
  modified_base 13: mod_base = OTHER; note = 2'-O-methylcytidine-3'-phosphate
  modified_base 15: mod_base = OTHER; note = 2'-O-methyluridine-3'-phosphate
  modified_base 16: mod_base = OTHER; note = 2'-O-methylcytidine-3'-phosphate
  modified_base 17: mod_base = OTHER; note = 2'-O-methyluridine-3'-phosphate
  modified_base 18: mod_base = OTHER; note = 2'-O-methylcytidine-3'-phosphate
  modified_base 19: mod_base = OTHER; note = 2'-O-methyladenosine-3'-phosphate
  modified_base 20: mod_base = OTHER; note = 2'-O-methylguanosine-3'-phosphate
  modified_base 21: mod_base = OTHER; note = 2'-O-methylcytidine-3'-phosphorothioate
  modified_base 22: mod_base = OTHER; note = 2'-O-methylcytidine-3'-phosphorothioate
  modified_base 23: mod_base = OTHER; note = 2'-O-methyluridine
  misc_feature 1: note = RNA
  misc_feature 3..4: note = RNA
  misc_feature 6: note = RNA
  misc_feature 8..11: note = RNA
  misc_feature 13: note = RNA
  misc_feature 15..23: note = RNA
  misc_feature 2: note = DNA
  misc_feature 5: note = DNA
  misc_feature 7: note = DNA
  misc_feature 12: note = DNA
  misc_feature 14: note = DNA
aaacgcctcccacttctcagcct

SEQ ID NO: 553 - DNA, 23 bp, synthetic construct
  source 1..23: mol_type = other DNA
  modified_base 1: mod_base = OTHER; note = 2'-O-methyluridine-3'-phosphorothioate
  modified_base 2: mod_base = OTHER; note = 2'-deoxyguanosine-3'-phosphorothioate
  modified_base 3: mod_base = OTHER; note = 2'-O-methylcytidine-3'-phosphate
  modified_base 4: mod_base = OTHER; note = 2'-O-methylguanosine-3'-phosphate
  modified_base 6: mod_base = OTHER; note = 2'-O-methylcytidine-3'-phosphate
  modified_base 8: mod_base = OTHER; note = 2'-O-methyladenosine-3'-phosphate
  modified_base 9: mod_base = OTHER; note = 2'-O-methyluridine-3'-phosphate
  modified_base 10: mod_base = OTHER; note = 2'-O-methylcytidine-3'-phosphate
  modified_base 11: mod_base = OTHER; note = 2'-O-methylcytidine-3'-phosphate
  modified_base 13: mod_base = OTHER; note = 2'-O-methylcytidine-3'-phosphate
  modified_base 15: mod_base = OTHER; note = 2'-O-methylguanosine-3'-phosphate
  modified_base 16: mod_base = OTHER; note = 2'-O-methylcytidine-3'-phosphate
  modified_base 17: mod_base = OTHER; note = 2'-O-methyladenosine-3'-phosphate
  modified_base 18: mod_base = OTHER; note = 2'-O-methylguanosine-3'-phosphate
  modified_base 19: mod_base = OTHER; note = 2'-O-methylcytidine-3'-phosphate
  modified_base 20: mod_base = OTHER; note = 2'-O-methyladenosine-3'-phosphate
  modified_base 21: mod_base = OTHER; note = 2'-O-methyluridine-3'-phosphorothioate
  modified_base 22: mod_base = OTHER; note = 2'-O-methylcytidine-3'-phosphorothioate
  modified_base 23: mod_base = OTHER; note = 2'-O-methyluridine
  misc_feature 1: note = RNA
  misc_feature 3..4: note = RNA
  misc_feature 6: note = RNA
  misc_feature 8..11: note = RNA
  misc_feature 13: note = RNA
  misc_feature 15..23: note = RNA
  misc_feature 2: note = DNA
  misc_feature 5: note = DNA
  misc_feature 7: note = DNA
  misc_feature 12: note = DNA
  misc_feature 14: note = DNA
tgcgtctatccgctgcagcatct

SEQ ID NO: 554 - DNA, 23 bp, synthetic construct
  source 1..23: mol_type = other DNA
  modified_base 1: mod_base = OTHER; note = 2'-O-methyladenosine-3'-phosphorothioate
  modified_base 2: mod_base = OTHER; note = 2'-deoxyadenosine-3'-phosphorothioate
  modified_base 3: mod_base = OTHER; note = 2'-O-methyluridine-3'-phosphate
  modified_base 4: mod_base = OTHER; note = 2'-O-methylcytidine-3'-phosphate
  modified_base 6: mod_base = OTHER; note = 2'-O-methylcytidine-3'-phosphate
  modified_base 8: mod_base = OTHER; note = 2'-O-methyladenosine-3'-phosphate
  modified_base 9: mod_base = OTHER; note = 2'-O-methylguanosine-3'-phosphate
  modified_base 10: mod_base = OTHER; note = 2'-O-methyladenosine-3'-phosphate
  modified_base 11: mod_base = OTHER; note = 2'-O-methyladenosine-3'-phosphate
  modified_base 13: mod_base = OTHER; note = 2'-O-methylguanosine-3'-phosphate
  modified_base 15: mod_base = OTHER; note = 2'-O-methyladenosine-3'-phosphate
  modified_base 16: mod_base = OTHER; note = 2'-O-methyladenosine-3'-phosphate
  modified_base 17: mod_base = OTHER; note = 2'-O-methyladenosine-3'-phosphate
  modified_base 18: mod_base = OTHER; note = 2'-O-methylguanosine-3'-phosphate
  modified_base 19: mod_base = OTHER; note = 2'-O-methyladenosine-3'-phosphate
  modified_base 20: mod_base = OTHER; note = 2'-O-methylguanosine-3'-phosphate
  modified_base 21: mod_base = OTHER; note = 2'-O-methyladenosine-3'-phosphorothioate
  modified_base 22: mod_base = OTHER; note = 2'-O-methyladenosine-3'-phosphorothioate
  modified_base 23: mod_base = OTHER; note = 2'-O-methyladenosine
  misc_feature 1: note = RNA
  misc_feature 3..4: note = RNA
  misc_feature 6: note = RNA
  misc_feature 8..11: note = RNA
  misc_feature 13: note = RNA
  misc_feature 15..23: note = RNA
  misc_feature 2: note = DNA
  misc_feature 5: note = DNA
  misc_feature 7: note = DNA
  misc_feature 12: note = DNA
  misc_feature 14: note = DNA
aatctcgagaatgcaaagagaaa

SEQ ID NO: 555 - DNA, 23 bp, synthetic construct
  source 1..23: mol_type = other DNA
  modified_base 1: mod_base = OTHER; note = 2'-O-methyladenosine-3'-phosphorothioate
  modified_base 2: mod_base = OTHER; note = 2'-deoxyguanosine-3'-phosphorothioate
  modified_base 3: mod_base = OTHER; note = 2'-O-methyladenosine-3'-phosphate
  modified_base 4: mod_base = OTHER; note = 2'-O-methyluridine-3'-phosphate
  modified_base 6: mod_base = OTHER; note = 2'-O-methyluridine-3'-phosphate
  modified_base 8: mod_base = OTHER; note = 2'-O-methylguanosine-3'-phosphate
  modified_base 9: mod_base = OTHER; note = 2'-O-methyladenosine-3'-phosphate
  modified_base 10: mod_base = OTHER; note = 2'-O-methylguanosine-3'-phosphate
  modified_base 11: mod_base = OTHER; note = 2'-O-methyladenosine-3'-phosphate
  modified_base 13: mod_base = OTHER; note = 2'-O-methyluridine-3'-phosphate
  modified_base 15: mod_base = OTHER; note = 2'-O-methylcytidine-3'-phosphate
  modified_base 16: mod_base = OTHER; note = 2'-O-methyladenosine-3'-phosphate
  modified_base 17: mod_base = OTHER; note = 2'-O-methyladenosine-3'-phosphate
  modified_base 18: mod_base = OTHER; note = 2'-O-methyladenosine-3'-phosphate
  modified_base 19: mod_base = OTHER; note = 2'-O-methylguanosine-3'-phosphate
  modified_base 20: mod_base = OTHER; note = 2'-O-methyladenosine-3'-phosphate
  modified_base 21: mod_base = OTHER; note = 2'-O-methylguanosine-3'-phosphorothioate
  modified_base 22: mod_base = OTHER; note = 2'-O-methyladenosine-3'-phosphorothioate
  modified_base 23: mod_base = OTHER; note = 2'-O-methyladenosine
  misc_feature 1: note = RNA
  misc_feature 3..4: note = RNA
  misc_feature 6: note = RNA
  misc_feature 8..11: note = RNA
  misc_feature 13: note = RNA
  misc_feature 15..23: note = RNA
  misc_feature 2: note = DNA
  misc_feature 5: note = DNA
  misc_feature 7: note = DNA
  misc_feature 12: note = DNA
  misc_feature 14: note = DNA
agatctcgagaatgcaaagagaa

SEQ ID NO: 556 - DNA, 23 bp, synthetic construct
  source 1..23: mol_type = other DNA
  modified_base 1: mod_base = OTHER; note = 2'-O-methyluridine-3'-phosphorothioate
  modified_base 2: mod_base = OTHER; note = 2'-deoxythymidine-3'-phosphorothioate
  modified_base 3: mod_base = OTHER; note = 2'-O-methyladenosine-3'-phosphate
  modified_base 4: mod_base = OTHER; note = 2'-O-methyladenosine-3'-phosphate
  modified_base 6: mod_base = OTHER; note = 2'-O-methyluridine-3'-phosphate
  modified_base 8: mod_base = OTHER; note = 2'-O-methylcytidine-3'-phosphate
  modified_base 9: mod_base = OTHER; note = 2'-O-methyladenosine-3'-phosphate
  modified_base 10: mod_base = OTHER; note = 2'-O-methyladenosine-3'-phosphate
  modified_base 11: mod_base = OTHER; note = 2'-O-methylguanosine-3'-phosphate
  modified_base 13: mod_base = OTHER; note = 2'-O-methyluridine-3'-phosphate
  modified_base 15: mod_base = OTHER; note = 2'-O-methylguanosine-3'-phosphate
  modified_base 16: mod_base = OTHER; note = 2'-O-methylguanosine-3'-phosphate
  modified_base 17: mod_base = OTHER; note = 2'-O-methylcytidine-3'-phosphate
  modified_base 18: mod_base = OTHER; note = 2'-O-methyluridine-3'-phosphate
  modified_base 19: mod_base = OTHER; note = 2'-O-methylcytidine-3'-phosphate
  modified_base 20: mod_base = OTHER; note = 2'-O-methylcytidine-3'-phosphate
  modified_base 21: mod_base = OTHER; note = 2'-O-methyladenosine-3'-phosphorothioate
  modified_base 22: mod_base = OTHER; note = 2'-O-methyladenosine-3'-phosphorothioate
  modified_base 23: mod_base = OTHER; note = 2'-O-methylguanosine
  misc_feature 1: note = RNA
  misc_feature 3..4: note = RNA
  misc_feature 6: note = RNA
  misc_feature 8..11: note = RNA
  misc_feature 13: note = RNA
  misc_feature 15..23: note = RNA
  misc_feature 2: note = DNA
  misc_feature 5: note = DNA
  misc_feature 7: note = DNA
  misc_feature 12: note = DNA
  misc_feature 14: note = DNA
ttaattccaaggtgggctccaag

SEQ ID NO: 557 - DNA, 23 bp, synthetic construct
  source 1..23: mol_type = other DNA
  modified_base 1: mod_base = OTHER; note = 2'-O-methyluridine-3'-phosphorothioate
  modified_base 2: mod_base = OTHER; note = 2'-deoxyguanosine-3'-phosphorothioate
  modified_base 3: mod_base = OTHER; note = 2'-O-methyluridine-3'-phosphate
  modified_base 4: mod_base = OTHER; note = 2'-O-methylguanosine-3'-phosphate
  modified_base 6: mod_base = OTHER; note = 2'-O-methyladenosine-3'-phosphate
  modified_base 8: mod_base = OTHER; note = 2'-O-methylcytidine-3'-phosphate
  modified_base 9: mod_base = OTHER; note = 2'-O-methylcytidine-3'-phosphate
  modified_base 10: mod_base = OTHER; note = 2'-O-methyladenosine-3'-phosphate
  modified_base 11: mod_base = OTHER; note = 2'-O-methylcytidine-3'-phosphate
  modified_base 13: mod_base = OTHER; note = 2'-O-methyluridine-3'-phosphate
  modified_base 15: mod_base = OTHER; note = 2'-O-methyladenosine-3'-phosphate
  modified_base 16: mod_base = OTHER; note = 2'-O-methyladenosine-3'-phosphate
  modified_base 17: mod_base = OTHER; note = 2'-O-methylcytidine-3'-phosphate
  modified_base 18: mod_base = OTHER; note = 2'-O-methyluridine-3'-phosphate
  modified_base 19: mod_base = OTHER; note = 2'-O-methylguanosine-3'-phosphate
  modified_base 20: mod_base = OTHER; note = 2'-O-methylguanosine-3'-phosphate
  modified_base 21: mod_base = OTHER; note = 2'-O-methylguanosine-3'-phosphorothioate
  modified_base 22: mod_base = OTHER; note = 2'-O-methyluridine-3'-phosphorothioate
  modified_base 23: mod_base = OTHER; note = 2'-O-methylcytidine
  misc_feature 1: note = RNA
  misc_feature 3..4: note = RNA
  misc_feature 6: note = RNA
  misc_feature 8..11: note = RNA
  misc_feature 13: note = RNA
  misc_feature 15..23: note = RNA
  misc_feature 2: note = DNA
  misc_feature 5: note = DNA
  misc_feature 7: note = DNA
  misc_feature 12: note = DNA
  misc_feature 14: note = DNA
tgtggatccacttgaactgggtc

SEQ ID NO: 558 - DNA, 23 bp, synthetic construct
  source 1..23: mol_type = other DNA
  modified_base 1: mod_base = OTHER; note = 2'-O-methyluridine-3'-phosphorothioate
  modified_base 2: mod_base = OTHER; note = 2'-deoxythymidine-3'-phosphorothioate
  modified_base 3: mod_base = OTHER; note = 2'-O-methyladenosine-3'-phosphate
  modified_base 4: mod_base = OTHER; note = 2'-O-methylguanosine-3'-phosphate
  modified_base 6: mod_base = OTHER; note = 2'-O-methylguanosine-3'-phosphate
  modified_base 8: mod_base = OTHER; note = 2'-O-methyladenosine-3'-phosphate
  modified_base 9: mod_base = OTHER; note = 2'-O-methylcytidine-3'-phosphate
  modified_base 10: mod_base = OTHER; note = 2'-O-methyluridine-3'-phosphate
  modified_base 11: mod_base = OTHER; note = 2'-O-methyluridine-3'-phosphate
  modified_base 13: mod_base = OTHER; note = 2'-O-methyluridine-3'-phosphate
  modified_base 15: mod_base = OTHER; note = 2'-O-methylcytidine-3'-phosphate
  modified_base 16: mod_base = OTHER; note = 2'-O-methyladenosine-3'-phosphate
  modified_base 17: mod_base = OTHER; note = 2'-O-methylcytidine-3'-phosphate
  modified_base 18: mod_base = OTHER; note = 2'-O-methylcytidine-3'-phosphate
  modified_base 19: mod_base = OTHER; note = 2'-O-methyladenosine-3'-phosphate
  modified_base 20: mod_base = OTHER; note = 2'-O-methylguanosine-3'-phosphate
  modified_base 21: mod_base = OTHER; note = 2'-O-methylguanosine-3'-phosphorothioate
  modified_base 22: mod_base = OTHER; note = 2'-O-methylcytidine-3'-phosphorothioate
  modified_base 23: mod_base = OTHER; note = 2'-O-methyluridine
  misc_feature 1: note = RNA
  misc_feature 3..4: note = RNA
  misc_feature 6: note = RNA
  misc_feature 8..11: note = RNA
  misc_feature 13: note = RNA
  misc_feature 15..23: note = RNA
  misc_feature 2: note = DNA
  misc_feature 5: note = DNA
  misc_feature 7: note = DNA
  misc_feature 12: note = DNA
  misc_feature 14: note = DNA
ttagggtacttgtccaccaggct

SEQ ID NO: 559 - DNA, 23 bp, synthetic construct
  source 1..23: mol_type = other DNA
  modified_base 1: mod_base = OTHER; note = 2'-O-methyladenosine-3'-phosphorothioate
  modified_base 2: mod_base = OTHER; note = 2'-deoxyguanosine-3'-phosphorothioate
  modified_base 3: mod_base = OTHER; note = 2'-O-methylcytidine-3'-phosphate
  modified_base 4: mod_base = OTHER; note = 2'-O-methylguanosine-3'-phosphate
  modified_base 6: mod_base = OTHER; note = 2'-O-methylcytidine-3'-phosphate
  modified_base 8: mod_base = OTHER; note = 2'-O-methyladenosine-3'-phosphate
  modified_base 9: mod_base = OTHER; note = 2'-O-methyladenosine-3'-phosphate
  modified_base 10: mod_base = OTHER; note = 2'-O-methylguanosine-3'-phosphate
  modified_base 11: mod_base = OTHER; note = 2'-O-methylcytidine-3'-phosphate
  modified_base 13: mod_base = OTHER; note = 2'-O-methyladenosine-3'-phosphate
  modified_base 15: mod_base = OTHER; note = 2'-O-methylcytidine-3'-phosphate
  modified_base 16: mod_base = OTHER; note = 2'-O-methyluridine-3'-phosphate
  modified_base 17: mod_base = OTHER; note = 2'-O-methylcytidine-3'-phosphate
  modified_base 18: mod_base = OTHER; note = 2'-O-methylguanosine-3'-phosphate
  modified_base 19: mod_base = OTHER; note = 2'-O-methyladenosine-3'-phosphate
  modified_base 20: mod_base = OTHER; note = 2'-O-methylguanosine-3'-phosphate
  modified_base 21: mod_base = OTHER; note = 2'-O-methyladenosine-3'-phosphorothioate
  modified_base 22: mod_base = OTHER; note = 2'-O-methyladenosine-3'-phosphorothioate
  modified_base 23: mod_base = OTHER; note = 2'-O-methyluridine
  misc_feature 1: note = RNA
  misc_feature 3..4: note = RNA
  misc_feature 6: note = RNA
  misc_feature 8..11: note = RNA
  misc_feature 13: note = RNA
  misc_feature 15..23: note = RNA
  misc_feature 2: note = DNA
  misc_feature 5: note = DNA
  misc_feature 7: note = DNA
  misc_feature 12: note = DNA
  misc_feature 14: note = DNA
agcggctaagcgatctcgagaat

SEQ ID NO: 560 - DNA, 23 bp, synthetic construct
  source 1..23: mol_type = other DNA
  modified_base 1: mod_base = OTHER; note = 2'-O-methyluridine-3'-phosphorothioate
  modified_base 2: mod_base = OTHER; note = 2'-deoxycytidine-3'-phosphorothioate
  modified_base 3: mod_base = OTHER; note = 2'-O-methylcytidine-3'-phosphate
  modified_base 4: mod_base = OTHER; note = 2'-O-methyluridine-3'-phosphate
  modified_base 6: mod_base = OTHER; note = 2'-O-methylguanosine-3'-phosphate
  modified_base 8: mod_base = OTHER; note = 2'-O-methyluridine-3'-phosphate
  modified_base 9: mod_base = OTHER; note = 2'-O-methyluridine-3'-phosphate
  modified_base 10: mod_base = OTHER; note = 2'-O-methylguanosine-3'-phosphate
  modified_base 11: mod_base = OTHER; note = 2'-O-methyluridine-3'-phosphate
  modified_base 13: mod_base = OTHER; note = 2'-O-methyladenosine-3'-phosphate
  modified_base 15: mod_base = OTHER; note = 2'-O-methyladenosine-3'-phosphate
  modified_base 16: mod_base = OTHER; note = 2'-O-methyluridine-3'-phosphate
  modified_base 17: mod_base = OTHER; note = 2'-O-methylguanosine-3'-phosphate
  modified_base 18: mod_base = OTHER; note = 2'-O-methylguanosine-3'-phosphate
  modified_base 19: mod_base = OTHER; note = 2'-O-methyladenosine-3'-phosphate
  modified_base 20: mod_base = OTHER; note = 2'-O-methylcytidine-3'-phosphate
  modified_base 21: mod_base = OTHER; note = 2'-O-methyluridine-3'-phosphorothioate
  modified_base 22: mod_base = OTHER; note = 2'-O-methylcytidine-3'-phosphorothioate
  modified_base 23: mod_base = OTHER; note = 2'-O-methyladenosine
  misc_feature 1: note = RNA
  misc_feature 3..4: note = RNA
  misc_feature 6: note = RNA
  misc_feature 8..11: note = RNA
  misc_feature 13: note = RNA
  misc_feature 15..23: note = RNA
  misc_feature 2: note = DNA
  misc_feature 5: note = DNA
  misc_feature 7: note = DNA
  misc_feature 12: note = DNA
  misc_feature 14: note = DNA
tcctcgcttgtcagatggactca

SEQ ID NO: 561 - DNA, 23 bp, synthetic construct
  source 1..23: mol_type = other DNA
  modified_base 1: mod_base = OTHER; note = 2'-O-methyladenosine-3'-phosphorothioate
  modified_base 2: mod_base = OTHER; note = 2'-deoxyguanosine-3'-phosphorothioate
  modified_base 3: mod_base = OTHER; note = 2'-O-methyluridine-3'-phosphate
  modified_base 4: mod_base = OTHER; note = 2'-O-methylcytidine-3'-phosphate
  modified_base 6: mod_base = OTHER; note = 2'-O-methylcytidine-3'-phosphate
  modified_base 8: mod_base = OTHER; note = 2'-O-methylguanosine-3'-phosphate
  modified_base 9: mod_base = OTHER; note = 2'-O-methyluridine-3'-phosphate
  modified_base 10: mod_base = OTHER; note = 2'-O-methyladenosine-3'-phosphate
  modified_base 11: mod_base = OTHER; note = 2'-O-methylguanosine-3'-phosphate
  modified_base 13: mod_base = OTHER; note = 2'-O-methylcytidine-3'-phosphate
  modified_base 15: mod_base = OTHER; note = 2'-O-methyladenosine-3'-phosphate
  modified_base 16: mod_base = OTHER; note = 2'-O-methyladenosine-3'-phosphate
  modified_base 17: mod_base = OTHER; note = 2'-O-methylcytidine-3'-phosphate
  modified_base 18: mod_base = OTHER; note = 2'-O-methyladenosine-3'-phosphate
  modified_base 19: mod_base = OTHER; note = 2'-O-methylguanosine-3'-phosphate
  modified_base 20: mod_base = OTHER; note = 2'-O-methylcytidine-3'-phosphate
  modified_base 21: mod_base = OTHER; note = 2'-O-methyluridine-3'-phosphorothioate
  modified_base 22: mod_base = OTHER; note = 2'-O-methylguanosine-3'-phosphorothioate
  modified_base 23: mod_base = OTHER; note = 2'-O-methylguanosine
  misc_feature 1: note = RNA
  misc_feature 3..4: note = RNA
  misc_feature 6: note = RNA
  misc_feature 8..11: note = RNA
  misc_feature 13: note = RNA
  misc_feature 15..23: note = RNA
  misc_feature 2: note = DNA
  misc_feature 5: note = DNA
  misc_feature 7: note = DNA
  misc_feature 12: note = DNA
  misc_feature 14: note = DNA
agtctccgtagccaaacagctgg

SEQ ID NO: 562 - DNA, 23 bp, synthetic construct
  source 1..23: mol_type = other DNA
  modified_base 1: mod_base = OTHER; note = 2'-O-methyladenosine-3'-phosphorothioate
  modified_base 2: mod_base = OTHER; note = 2'-deoxycytidine-3'-phosphorothioate
  modified_base 3: mod_base = OTHER; note = 2'-O-methylguanosine-3'-phosphate
  modified_base 4: mod_base = OTHER; note = 2'-O-methyluridine-3'-phosphate
  modified_base 6: mod_base = OTHER; note = 2'-O-methyluridine-3'-phosphate
  modified_base 8: mod_base = OTHER; note = 2'-O-methyluridine-3'-phosphate
  modified_base 9: mod_base = OTHER; note = 2'-O-methylcytidine-3'-phosphate
  modified_base 10: mod_base = OTHER; note = 2'-O-methylcytidine-3'-phosphate
  modified_base 11: mod_base = OTHER; note = 2'-O-methylguanosine-3'-phosphate
  modified_base 13: mod_base = OTHER; note = 2'-O-methyluridine-3'-phosphate
  modified_base 15: mod_base = OTHER; note = 2'-O-methylcytidine-3'-phosphate
  modified_base 16: mod_base = OTHER; note = 2'-O-methyladenosine-3'-phosphate
  modified_base 17: mod_base = OTHER; note = 2'-O-methylguanosine-3'-phosphate
  modified_base 18: mod_base = OTHER; note = 2'-O-methylcytidine-3'-phosphate
  modified_base 19: mod_base = OTHER; note = 2'-O-methyladenosine-3'-phosphate
  modified_base 20: mod_base = OTHER; note = 2'-O-methyluridine-3'-phosphate
  modified_base 21: mod_base = OTHER; note = 2'-O-methylcytidine-3'-phosphorothioate
  modified_base 22: mod_base = OTHER; note = 2'-O-methyluridine-3'-phosphorothioate
  modified_base 23: mod_base = OTHER; note = 2'-O-methyluridine
  misc_feature 1: note = RNA
  misc_feature 3..4: note = RNA
  misc_feature 6: note = RNA
  misc_feature 8..11: note = RNA
  misc_feature 13: note = RNA
  misc_feature 15..23: note = RNA
  misc_feature 2: note = DNA
  misc_feature 5: note = DNA
  misc_feature 7: note = DNA
  misc_feature 12: note = DNA
  misc_feature 14: note = DNA
acgtctatccgctgcagcatctt

SEQ ID NO: 563 - DNA, 23 bp, synthetic construct
  source 1..23: mol_type = other DNA
  modified_base 1: mod_base = OTHER; note = 2'-O-methyladenosine-3'-phosphorothioate
  modified_base 2: mod_base = OTHER; note = 2'-deoxyadenosine-3'-phosphorothioate
  modified_base 3: mod_base = OTHER; note = 2'-O-methylguanosine-3'-phosphate
  modified_base 4: mod_base = OTHER; note = 2'-O-methylcytidine-3'-phosphate
  modified_base 6: mod_base = OTHER; note = 2'-O-methyladenosine-3'-phosphate
  modified_base 8: mod_base = OTHER; note = 2'-O-methyluridine-3'-phosphate
  modified_base 9: mod_base = OTHER; note = 2'-O-methyluridine-3'-phosphate
  modified_base 10: mod_base = OTHER; note = 2'-O-methyladenosine-3'-phosphate
  modified_base 11: mod_base = OTHER; note = 2'-O-methyladenosine-3'-phosphate
  modified_base 13: mod_base = OTHER; note = 2'-O-methyluridine-3'-phosphate
  modified_base 15: mod_base = OTHER; note = 2'-O-methylguanosine-3'-phosphate
  modified_base 16: mod_base = OTHER; note = 2'-O-methylcytidine-3'-phosphate
  modified_base 17: mod_base = OTHER; note = 2'-O-methyladenosine-3'-phosphate
  modified_base 18: mod_base = OTHER; note = 2'-O-methylguanosine-3'-phosphate
  modified_base 19: mod_base = OTHER; note = 2'-O-methyladenosine-3'-phosphate
  modified_base 20: mod_base = OTHER; note = 2'-O-methyluridine-3'-phosphate
  modified_base 21: mod_base = OTHER; note = 2'-O-methyluridine-3'-phosphorothioate
  modified_base 22: mod_base = OTHER; note = 2'-O-methyluridine-3'-phosphorothioate
  modified_base 23: mod_base = OTHER; note = 2'-O-methyluridine
  misc_feature 1: note = RNA
  misc_feature 3..4: note = RNA
  misc_feature 6: note = RNA
  misc_feature 8..11: note = RNA
  misc_feature 13: note = RNA
  misc_feature 15..23: note = RNA
  misc_feature 2: note = DNA
  misc_feature 5: note = DNA
  misc_feature 7: note = DNA
  misc_feature 12: note = DNA
  misc_feature 14: note = DNA
aagctaattaaatggcagatttt

SEQ ID NO: 564 - DNA, 23 bp, synthetic construct
  source 1..23: mol_type = other DNA
  modified_base 1: mod_base = OTHER; note = 2'-O-methyladenosine-3'-phosphorothioate
  modified_base 2: mod_base = OTHER; note = 2'-deoxycytidine-3'-phosphorothioate
  modified_base 3: mod_base = OTHER; note = 2'-O-methyluridine-3'-phosphate
  modified_base 4: mod_base = OTHER; note = 2'-O-methyladenosine-3'-phosphate
  modified_base 6: mod_base = OTHER; note = 2'-O-methylguanosine-3'-phosphate
  modified_base 8: mod_base = OTHER; note = 2'-O-methylguanosine-3'-phosphate
  modified_base 9: mod_base = OTHER; note = 2'-O-methyladenosine-3'-phosphate
  modified_base 10: mod_base = OTHER; note = 2'-O-methyluridine-3'-phosphate
  modified_base 11: mod_base = OTHER; note = 2'-O-methylcytidine-3'-phosphate
  modified_base 13: mod_base = OTHER; note = 2'-O-methylcytidine-3'-phosphate
  modified_base 15: mod_base = OTHER; note = 2'-O-methyladenosine-3'-phosphate
  modified_base 16: mod_base = OTHER; note = 2'-O-methylguanosine-3'-phosphate
  modified_base 17: mod_base = OTHER; note = 2'-O-methyladenosine-3'-phosphate
  modified_base 18: mod_base = OTHER; note = 2'-O-methyladenosine-3'-phosphate
  modified_base 19: mod_base = OTHER; note = 2'-O-methyluridine-3'-phosphate
  modified_base 20: mod_base = OTHER; note = 2'-O-methylguanosine-3'-phosphate
  modified_base 21: mod_base = OTHER; note = 2'-O-methylcytidine-3'-phosphorothioate
  modified_base 22: mod_base = OTHER; note = 2'-O-methyladenosine-3'-phosphorothioate
  modified_base 23: mod_base = OTHER; note = 2'-O-methyladenosine
  misc_feature 1: note = RNA
  misc_feature 3..4: note = RNA
  misc_feature 6: note = RNA
  misc_feature 8..11: note = RNA
  misc_feature 13: note = RNA
  misc_feature 15..23: note = RNA
  misc_feature 2: note = DNA
  misc_feature 5: note = DNA
  misc_feature 7: note = DNA
  misc_feature 12: note = DNA
  misc_feature 14: note = DNA
actaagcgatctcgagaatgcaa

SEQ ID NO: 565 - DNA, 23 bp, synthetic construct
  source 1..23: mol_type = other DNA
  modified_base 1: mod_base = OTHER; note = 2'-O-methyluridine-3'-phosphorothioate
  modified_base 2: mod_base = OTHER; note = 2'-deoxythymidine-3'-phosphorothioate
  modified_base 3: mod_base = OTHER; note = 2'-O-methyluridine-3'-phosphate
  modified_base 4: mod_base = OTHER; note = 2'-O-methylcytidine-3'-phosphate
  modified_base 6: mod_base = OTHER; note = 2'-O-methyluridine-3'-phosphate
  modified_base 8: mod_base = OTHER; note = 2'-O-methyladenosine-3'-phosphate
  modified_base 9: mod_base = OTHER; note = 2'-O-methylcytidine-3'-phosphate
  modified_base 10: mod_base = OTHER; note = 2'-O-methyladenosine-3'-phosphate
  modified_base 11: mod_base = OTHER; note = 2'-O-methylcytidine-3'-phosphate
  modified_base 13: mod_base = OTHER; note = 2'-O-methyladenosine-3'-phosphate
  modified_base 15: mod_base = OTHER; note = 2'-O-methylcytidine-3'-phosphate
  modified_base 16: mod_base = OTHER; note = 2'-O-methyladenosine-3'-phosphate
  modified_base 17: mod_base = OTHER; note = 2'-O-methyluridine-3'-phosphate
  modified_base 18: mod_base = OTHER; note = 2'-O-methyladenosine-3'-phosphate
  modified_base 19: mod_base = OTHER; note = 2'-O-methylcytidine-3'-phosphate
  modified_base 20: mod_base = OTHER; note = 2'-O-methyladenosine-3'-phosphate
  modified_base 21: mod_base = OTHER; note = 2'-O-methyladenosine-3'-phosphorothioate
  modified_base 22: mod_base = OTHER; note = 2'-O-methylguanosine-3'-phosphorothioate
  modified_base 23: mod_base = OTHER; note = 2'-O-methylcytidine
  misc_feature 1: note = RNA
  misc_feature 3..4: note = RNA
  misc_feature 6: note = RNA
  misc_feature 8..11: note = RNA
  misc_feature 13: note = RNA
  misc_feature 15..23: note = RNA
  misc_feature 2: note = DNA
  misc_feature 5: note = DNA
  misc_feature 7: note = DNA
  misc_feature 12: note = DNA
  misc_feature 14: note = DNA
tttcctcacacgaccatacaagc

SEQ ID NO: 566 - DNA, 23 bp, synthetic construct
  source 1..23: mol_type = other DNA
  modified_base 1: mod_base = OTHER; note = 2'-O-methyladenosine-3'-phosphorothioate
  modified_base 2: mod_base = OTHER; note = 2'-deoxythymidine-3'-phosphorothioate
  modified_base 3: mod_base = OTHER; note = 2'-O-methyladenosine-3'-phosphate
  modified_base 4: mod_base = OTHER; note = 2'-O-methyluridine-3'-phosphate
  modified_base 6: mod_base = OTHER; note = 2'-O-methylcytidine-3'-phosphate
  modified_base 8: mod_base = OTHER; note = 2'-O-methylcytidine-3'-phosphate
  modified_base 9: mod_base = OTHER; note = 2'-O-methyluridine-3'-phosphate
  modified_base 10: mod_base = OTHER; note = 2'-O-methylguanosine-3'-phosphate
  modified_base 11: mod_base = OTHER; note = 2'-O-methylcytidine-3'-phosphate
  modified_base 13: mod_base = OTHER; note = 2'-O-methylguanosine-3'-phosphate
  modified_base 15: mod_base = OTHER; note = 2'-O-methyladenosine-3'-phosphate
  modified_base 16: mod_base = OTHER; note = 2'-O-methyluridine-3'-phosphate
  modified_base 17: mod_base = OTHER; note = 2'-O-methylcytidine-3'-phosphate
  modified_base 18: mod_base = OTHER; note = 2'-O-methyluridine-3'-phosphate
  modified_base 19: mod_base = OTHER; note = 2'-O-methyluridine-3'-phosphate
  modified_base 20: mod_base = OTHER; note = 2'-O-methylcytidine-3'-phosphate
  modified_base 21: mod_base = OTHER; note = 2'-O-methyladenosine-3'-phosphorothioate
  modified_base 22: mod_base = OTHER; note = 2'-O-methylcytidine-3'-phosphorothioate
  modified_base 23: mod_base = OTHER; note = 2'-O-methylcytidine
  misc_feature 1: note = RNA
  misc_feature 3..4: note = RNA
  misc_feature 6: note = RNA
  misc_feature 8..11: note = RNA
  misc_feature 13: note = RNA
  misc_feature 15..23: note = RNA
  misc_feature 2: note = DNA
  misc_feature 5: note = DNA
  misc_feature 7: note = DNA
  misc_feature 12: note = DNA
  misc_feature 14: note = DNA
atatccgctgcagcatcttcacc

SEQ ID NO: 567 - DNA, 23 bp, synthetic construct
  source 1..23: mol_type = other DNA
  modified_base 1: mod_base = OTHER; note = 2'-O-methyladenosine-3'-phosphorothioate
  modified_base 2: mod_base = OTHER; note = 2'-deoxyadenosine-3'-phosphorothioate
  modified_base 3: mod_base = OTHER; note = 2'-O-methyluridine-3'-phosphate
  modified_base 4: mod_base = OTHER; note = 2'-O-methylguanosine-3'-phosphate
  modified_base 6: mod_base = OTHER; note = 2'-O-methylcytidine-3'-phosphate
  modified_base 8: mod_base = OTHER; note = 2'-O-methyluridine-3'-phosphate
  modified_base 9: mod_base = OTHER; note = 2'-O-methylcytidine-3'-phosphate
  modified_base 10: mod_base = OTHER; note = 2'-O-methyladenosine-3'-phosphate
  modified_base 11: mod_base = OTHER; note = 2'-O-methyladenosine-3'-phosphate
  modified_base 13: mod_base = OTHER; note = 2'-O-methylguanosine-3'-phosphate
  modified_base 15: mod_base = OTHER; note = 2'-O-methylcytidine-3'-phosphate
  modified_base 16: mod_base = OTHER; note = 2'-O-methylcytidine-3'-phosphate
  modified_base 17: mod_base = OTHER; note = 2'-O-methyluridine-3'-phosphate
  modified_base 18: mod_base = OTHER; note = 2'-O-methylguanosine-3'-phosphate
  modified_base 19: mod_base = OTHER; note = 2'-O-methylcytidine-3'-phosphate
  modified_base 20: mod_base = OTHER; note = 2'-O-methyladenosine-3'-phosphate
  modified_base 21: mod_base = OTHER; note = 2'-O-methylguanosine-3'-phosphorothioate
  modified_base 22: mod_base = OTHER; note = 2'-O-methylguanosine-3'-phosphorothioate
  modified_base 23: mod_base = OTHER; note = 2'-O-methylcytidine
  misc_feature 1: note = RNA
  misc_feature 3..4: note = RNA
  misc_feature 6: note = RNA
  misc_feature 8..11: note = RNA
  misc_feature 13: note = RNA
  misc_feature 15..23: note = RNA
  misc_feature 2: note = DNA
  misc_feature 5: note = DNA
  misc_feature 7: note = DNA
  misc_feature 12: note = DNA
  misc_feature 14: note = DNA
aatgccatcaaagccctgcaggc

SEQ ID NO: 568 - DNA, 23 bp, synthetic construct
  source 1..23: mol_type = other DNA
  modified_base 1: mod_base = OTHER; note = 2'-O-methyladenosine-3'-phosphorothioate
  modified_base 2: mod_base = OTHER; note = 2'-deoxyadenosine-3'-phosphorothioate
  modified_base 3: mod_base = OTHER; note = 2'-O-methylcytidine-3'-phosphate
  modified_base 4: mod_base = OTHER; note = 2'-O-methyladenosine-3'-phosphate
  modified_base 6: mod_base = OTHER; note = 2'-O-methylcytidine-3'-phosphate
  modified_base 8: mod_base = OTHER; note = 2'-O-methylcytidine-3'-phosphate
  modified_base 9: mod_base = OTHER; note = 2'-O-methylguanosine-3'-phosphate
  modified_base 10: mod_base = OTHER; note = 2'-O-methyluridine-3'-phosphate
  modified_base 11: mod_base = OTHER; note = 2'-O-methylcytidine-3'-phosphate
  modified_base 13: mod_base = OTHER; note = 2'-O-methylcytidine-3'-phosphate
  modified_base 15: mod_base = OTHER; note = 2'-O-methylguanosine-3'-phosphate
  modified_base 16: mod_base = OTHER; note = 2'-O-methyluridine-3'-phosphate
  modified_base 17: mod_base = OTHER; note = 2'-O-methyladenosine-3'-phosphate
  modified_base 18: mod_base = OTHER; note = 2'-O-methylguanosine-3'-phosphate
  modified_base 19: mod_base = OTHER; note = 2'-O-methylcytidine-3'-phosphate
  modified_base 20: mod_base = OTHER; note = 2'-O-methylcytidine-3'-phosphate
  modified_base 21: mod_base = OTHER; note = 2'-O-methyladenosine-3'-phosphorothioate
  modified_base 22: mod_base = OTHER; note = 2'-O-methyladenosine-3'-phosphorothioate
  modified_base 23: mod_base = OTHER; note = 2'-O-methyladenosine
  misc_feature 1: note = RNA
  misc_feature 3..4: note = RNA
  misc_feature 6: note = RNA
  misc_feature 8..11: note = RNA
  misc_feature 13: note = RNA
  misc_feature 15..23: note = RNA
  misc_feature 2: note = DNA
  misc_feature 5: note = DNA
  misc_feature 7: note = DNA
  misc_feature 12: note = DNA
  misc_feature 14: note = DNA
aacaccacgtctccgtagccaaa

SEQ ID NO: 569 - DNA, 23 bp, synthetic construct
  source 1..23: mol_type = other DNA
  modified_base 1: mod_base = OTHER; note = 2'-O-methyluridine-3'-phosphorothioate
  modified_base 2: mod_base = OTHER; note = 2'-deoxycytidine-3'-phosphorothioate
  modified_base 3: mod_base = OTHER; note = 2'-O-methyluridine-3'-phosphate
  modified_base 4: mod_base = OTHER; note = 2'-O-methyladenosine-3'-phosphate
  modified_base 6: mod_base = OTHER; note = 2'-O-methylcytidine-3'-phosphate
  modified_base 8: mod_base = OTHER; note = 2'-O-methylguanosine-3'-phosphate
  modified_base 9: mod_base = OTHER; note = 2'-O-methylcytidine-3'-phosphate
  modified_base 10: mod_base = OTHER; note = 2'-O-methyluridine-3'-phosphate
  modified_base 11: mod_base = OTHER; note = 2'-O-methylguanosine-3'-phosphate
  modified_base 13: mod_base = OTHER; note = 2'-O-methyladenosine-3'-phosphate
  modified_base 15: mod_base = OTHER; note = 2'-O-methylcytidine-3'-phosphate
  modified_base 16: mod_base = OTHER; note = 2'-O-methyladenosine-3'-phosphate
  modified_base 17: mod_base = OTHER; note = 2'-O-methyluridine-3'-phosphate
  modified_base 18: mod_base = OTHER; note = 2'-O-methylcytidine-3'-phosphate
  modified_base 19: mod_base = OTHER; note = 2'-O-methyluridine-3'-phosphate
  modified_base 20: mod_base = OTHER; note = 2'-O-methyluridine-3'-phosphate
  modified_base 21: mod_base = OTHER; note = 2'-O-methylcytidine-3'-phosphorothioate
  modified_base 22: mod_base = OTHER; note = 2'-O-methyladenosine-3'-phosphorothioate
  modified_base 23: mod_base = OTHER; note = 2'-O-methylcytidine
  misc_feature 1: note = RNA
  misc_feature 3..4: note = RNA
  misc_feature 6: note = RNA
  misc_feature 8..11: note = RNA
  misc_feature 13: note = RNA
  misc_feature 15..23: note = RNA
  misc_feature 2: note = DNA
  misc_feature 5: note = DNA
  misc_feature 7: note = DNA
  misc_feature 12: note = DNA
  misc_feature 14: note = DNA
tctatccgctgcagcatcttcac

SEQ ID NO: 570 - DNA, 23 bp, synthetic construct
  source 1..23: mol_type = other DNA
  modified_base 1: mod_base = OTHER; note = 2'-O-methyladenosine-3'-phosphorothioate
  modified_base 2: mod_base = OTHER; note = 2'-deoxycytidine-3'-phosphorothioate
  modified_base 3: mod_base = OTHER; note = 2'-O-methyladenosine-3'-phosphate
  modified_base 4: mod_base = OTHER; note = 2'-O-methyluridine-3'-phosphate
  modified_base 6: mod_base = OTHER; note = 2'-O-methylguanosine-3'-phosphate
  modified_base 8: mod_base = OTHER; note = 2'-O-methyladenosine-3'-phosphate
  modified_base 9: mod_base = OTHER; note = 2'-O-methylguanosine-3'-phosphate
  modified_base 10: mod_base = OTHER; note = 2'-O-methylguanosine-3'-phosphate
  modified_base 11: mod_base = OTHER; note = 2'-O-methyluridine-3'-phosphate
  modified_base 13: mod_base = OTHER; note = 2'-O-methyluridine-3'-phosphate
  modified_base 15: mod_base = OTHER; note = 2'-O-methyluridine-3'-phosphate
  modified_base 16: mod_base = OTHER; note = 2'-O-methylcytidine-3'-phosphate
  modified_base 17: mod_base = OTHER; note = 2'-O-methylcytidine-3'-phosphate
  modified_base 18: mod_base = OTHER; note = 2'-O-methyladenosine-3'-phosphate
  modified_base 19: mod_base = OTHER; note = 2'-O-methylguanosine-3'-phosphate
  modified_base 20: mod_base = OTHER; note = 2'-O-methylcytidine-3'-phosphate
  modified_base 21: mod_base = OTHER; note = 2'-O-methyluridine-3'-phosphorothioate
  modified_base 22: mod_base = OTHER; note = 2'-O-methylcytidine-3'-phosphorothioate
  modified_base 23: mod_base = OTHER; note = 2'-O-methylcytidine
  misc_feature 1: note = RNA
  misc_feature 3..4: note = RNA
  misc_feature 6: note = RNA
  misc_feature 8..11: note = RNA
  misc_feature 13: note = RNA
  misc_feature 15..23: note = RNA
  misc_feature 2: note = DNA
  misc_feature 5: note = DNA
  misc_feature 7: note = DNA
  misc_feature 12: note = DNA
  misc_feature 14: note = DNA
acattgaaggtgtctccagctcc

SEQ ID NO: 571 - DNA, 23 bp, synthetic construct
  source 1..23: mol_type = other DNA
  modified_base 1: mod_base = OTHER; note = 2'-O-methyladenosine-3'-phosphorothioate
  modified_base 2: mod_base = OTHER; note = 2'-deoxycytidine-3'-phosphorothioate
  modified_base 3: mod_base = OTHER; note = 2'-O-methyladenosine-3'-phosphate
  modified_base 4: mod_base = OTHER; note = 2'-O-methylcytidine-3'-phosphate
  modified_base 6: mod_base = OTHER; note = 2'-O-methyluridine-3'-phosphate
  modified_base 8: mod_base = OTHER; note = 2'-O-methyluridine-3'-phosphate
  modified_base 9: mod_base = OTHER; note = 2'-O-methylcytidine-3'-phosphate
  modified_base 10: mod_base = OTHER; note = 2'-O-methylcytidine-3'-phosphate
  modified_base 11: mod_base = OTHER; note = 2'-O-methylguanosine-3'-phosphate
  modified_base 13: mod_base = OTHER; note = 2'-O-methyladenosine-3'-phosphate
  modified_base 15: mod_base = OTHER; note = 2'-O-methylcytidine-3'-phosphate
  modified_base 16: mod_base = OTHER; note = 2'-O-methylcytidine-3'-phosphate
  modified_base 17: mod_base = OTHER; note = 2'-O-methyladenosine-3'-phosphate
  modified_base 18: mod_base = OTHER; note = 2'-O-methyladenosine-3'-phosphate
  modified_base 19: mod_base = OTHER; note = 2'-O-methyladenosine-3'-phosphate
  modified_base 20: mod_base = OTHER; note = 2'-O-methylcytidine-3'-phosphate
  modified_base 21: mod_base = OTHER; note = 2'-O-methyladenosine-3'-phosphorothioate
  modified_base 22: mod_base = OTHER; note = 2'-O-methylguanosine-3'-phosphorothioate
  modified_base 23: mod_base = OTHER; note = 2'-O-methylcytidine
  misc_feature 1: note = RNA
  misc_feature 3..4: note = RNA
  misc_feature 6: note = RNA
  misc_feature 8..11: note = RNA
  misc_feature 13: note = RNA
  misc_feature 15..23: note = RNA
  misc_feature 2: note = DNA
  misc_feature 5: note = DNA
  misc_feature 7: note = DNA
  misc_feature 12: note = DNA
  misc_feature 14: note = DNA
acacgtctccgtagccaaacagc

SEQ ID NO: 572 - DNA, 23 bp, synthetic construct
  source 1..23: mol_type = other DNA
  modified_base 1: mod_base = OTHER; note = 2'-O-methyladenosine-3'-phosphorothioate
  modified_base 2: mod_base = OTHER; note = 2'-deoxythymidine-3'-phosphorothioate
  modified_base 3: mod_base = OTHER; note = 2'-O-methyladenosine-3'-phosphate
  modified_base 4: mod_base = OTHER; note = 2'-O-methyladenosine-3'-phosphate
  modified_base 6: mod_base = OTHER; note = 2'-O-methylcytidine-3'-phosphate
  modified_base 8: mod_base = OTHER; note = 2'-O-methyladenosine-3'-phosphate
  modified_base 9: mod_base = OTHER; note = 2'-O-methyluridine-3'-phosphate
  modified_base 10: mod_base = OTHER; note = 2'-O-methylcytidine-3'-phosphate
  modified_base 11: mod_base = OTHER; note = 2'-O-methyluridine-3'-phosphate
  modified_base 13: mod_base = OTHER; note = 2'-O-methylguanosine-3'-phosphate
  modified_base 15: mod_base = OTHER; note = 2'-O-methylguanosine-3'-phosphate
  modified_base 16: mod_base = OTHER; note = 2'-O-methyladenosine-3'-phosphate
  modified_base 17: mod_base = OTHER; note = 2'-O-methyladenosine-3'-phosphate
  modified_base 18: mod_base = OTHER; note = 2'-O-methyluridine-3'-phosphate
  modified_base 19: mod_base = OTHER; note = 2'-O-methylguanosine-3'-phosphate
  modified_base 20: mod_base = OTHER; note = 2'-O-methylcytidine-3'-phosphate
  modified_base 21: mod_base = OTHER; note = 2'-O-methyladenosine-3'-phosphorothioate
  modified_base 22: mod_base = OTHER; note = 2'-O-methyladenosine-3'-phosphorothioate
  modified_base 23: mod_base = OTHER; note = 2'-O-methyladenosine
  misc_feature 1: note = RNA
  misc_feature 3..4: note = RNA
  misc_feature 6: note = RNA
  misc_feature 8..11: note = RNA
  misc_feature 13: note = RNA
  misc_feature 15..23: note = RNA
  misc_feature 2: note = DNA
  misc_feature 5: note = DNA
  misc_feature 7: note = DNA
  misc_feature 12: note = DNA
  misc_feature 14: note = DNA
ataagcgatctcgagaatgcaaa

SEQ ID NO: 573 - DNA, 23 bp, synthetic construct
  source 1..23: mol_type = other DNA
  modified_base 1: mod_base = OTHER; note = 2'-O-methyluridine-3'-phosphorothioate
  modified_base 2: mod_base = OTHER; note = 2'-deoxythymidine-3'-phosphorothioate
  modified_base 3: mod_base = OTHER; note = 2'-O-methyladenosine-3'-phosphate
  modified_base 4: mod_base = OTHER; note = 2'-O-methyladenosine-3'-phosphate
  modified_base 6: mod_base = OTHER; note = 2'-O-methylguanosine-3'-phosphate
  modified_base 8: mod_base = OTHER; note = 2'-O-methylguanosine-3'-phosphate
  modified_base 9: mod_base = OTHER; note = 2'-O-methylcytidine-3'-phosphate
  modified_base 10: mod_base = OTHER; note = 2'-O-methylguanosine-3'-phosphate
  modified_base 11: mod_base = OTHER; note = 2'-O-methylguanosine-3'-phosphate
  modified_base 13: mod_base = OTHER; note = 2'-O-methyluridine-3'-phosphate
  modified_base 15: mod_base = OTHER; note = 2'-O-methyladenosine-3'-phosphate
  modified_base 16: mod_base = OTHER; note = 2'-O-methylguanosine-3'-phosphate
  modified_base 17: mod_base = OTHER; note = 2'-O-methylcytidine-3'-phosphate
  modified_base 18: mod_base = OTHER; note = 2'-O-methylguanosine-3'-phosphate
  modified_base 19: mod_base = OTHER; note = 2'-O-methyladenosine-3'-phosphate
  modified_base 20: mod_base = OTHER; note = 2'-O-methyluridine-3'-phosphate
  modified_base 21: mod_base = OTHER; note = 2'-O-methylcytidine-3'-phosphorothioate
  modified_base 22: mod_base = OTHER; note = 2'-O-methyluridine-3'-phosphorothioate
  modified_base 23: mod_base = OTHER; note = 2'-O-methylcytidine
  misc_feature 1: note = RNA
  misc_feature 3..4: note = RNA
  misc_feature 6: note = RNA
  misc_feature 8..11: note = RNA
  misc_feature 13: note = RNA
  misc_feature 15..23: note = RNA
  misc_feature 2: note = DNA
  misc_feature 5: note = DNA
  misc_feature 7: note = DNA
  misc_feature 12: note = DNA
  misc_feature 14: note = DNA
ttaaagcgcggctaagcgatctc

SEQ ID NO: 574 - DNA, 23 bp, synthetic construct
  source 1..23: mol_type = other DNA
  modified_base 1: mod_base = OTHER; note = 2'-O-methyluridine-3'-phosphorothioate
  modified_base 2: mod_base = OTHER; note = 2'-deoxycytidine-3'-phosphorothioate
  modified_base 3: mod_base = OTHER; note = 2'-O-methyladenosine-3'-phosphate
  modified_base 4: mod_base = OTHER; note = 2'-O-methyladenosine-3'-phosphate
  modified_base 6: mod_base = OTHER; note = 2'-O-methyluridine-3'-phosphate
  modified_base 8: mod_base = OTHER; note = 2'-O-methyladenosine-3'-phosphate
  modified_base 9: mod_base = OTHER; note = 2'-O-methylcytidine-3'-phosphate
  modified_base 10: mod_base = OTHER; note = 2'-O-methyladenosine-3'-phosphate
  modified_base 11: mod_base = OTHER; note = 2'-O-methylguanosine-3'-phosphate
  modified_base 13: mod_base = OTHER; note = 2'-O-methylcytidine-3'-phosphate
  modified_base 15: mod_base = OTHER; note = 2'-O-methylguanosine-3'-phosphate
  modified_base 16: mod_base = OTHER; note = 2'-O-methylguanosine-3'-phosphate
  modified_base 17: mod_base = OTHER; note = 2'-O-methyluridine-3'-phosphate
  modified_base 18: mod_base = OTHER; note = 2'-O-methylguanosine-3'-phosphate
  modified_base 19: mod_base = OTHER; note = 2'-O-methylguanosine-3'-phosphate
  modified_base 20: mod_base = OTHER; note = 2'-O-methylguanosine-3'-phosphate
  modified_base 21: mod_base = OTHER; note = 2'-O-methylcytidine-3'-phosphorothioate
  modified_base 22: mod_base = OTHER; note = 2'-O-methyladenosine-3'-phosphorothioate
  modified_base 23: mod_base = OTHER; note = 2'-O-methylguanosine
  misc_feature 1: note = RNA
  misc_feature 3..4: note = RNA
  misc_feature 6: note = RNA
  misc_feature 8..11: note = RNA
  misc_feature 13: note = RNA
  misc_feature 15..23: note = RNA
  misc_feature 2: note = DNA
  misc_feature 5: note = DNA
  misc_feature 7: note = DNA
  misc_feature 12: note = DNA
  misc_feature 14: note = DNA
tcaaatcacaggctggtgggcag

SEQ ID NO: 575 - DNA, 23 bp, synthetic construct
  source 1..23: mol_type = other DNA
  modified_base 1: mod_base = OTHER; note = 2'-O-methyluridine-3'-phosphorothioate
  modified_base 2: mod_base = OTHER; note = 2'-deoxythymidine-3'-phosphorothioate
  modified_base 3: mod_base = OTHER; note = 2'-O-methylguanosine-3'-phosphate
  modified_base 4: mod_base = OTHER; note = 2'-O-methylcytidine-3'-phosphate
  modified_base 6: mod_base = OTHER; note = 2'-O-methylguanosine-3'-phosphate
  modified_base 8: mod_base = OTHER; note = 2'-O-methylcytidine-3'-phosphate
  modified_base 9: mod_base = OTHER; note = 2'-O-methyladenosine-3'-phosphate
  modified_base 10: mod_base = OTHER; note = 2'-O-methyladenosine-3'-phosphate
  modified_base 11: mod_base = OTHER; note = 2'-O-methyladenosine-3'-phosphate
  modified_base 13: mod_base = OTHER; note = 2'-O-methyladenosine-3'-phosphate
  modified_base 15: mod_base = OTHER; note = 2'-O-methylcytidine-3'-phosphate
  modified_base 16: mod_base = OTHER; note = 2'-O-methyladenosine-3'-phosphate
  modified_base 17: mod_base = OTHER; note = 2'-O-methylcytidine-3'-phosphate
  modified_base 18: mod_base = OTHER; note = 2'-O-methylguanosine-3'-phosphate
  modified_base 19: mod_base = OTHER; note = 2'-O-methyluridine-3'-phosphate
  modified_base 20: mod_base = OTHER; note = 2'-O-methylcytidine-3'-phosphate
  modified_base 21: mod_base = OTHER; note = 2'-O-methyluridine-3'-phosphorothioate
  modified_base 22: mod_base = OTHER; note = 2'-O-methylcytidine-3'-phosphorothioate
  modified_base 23: mod_base = OTHER; note = 2'-O-methylcytidine
  misc_feature 1: note = RNA
  misc_feature 3..4: note = RNA
  misc_feature 6: note = RNA
  misc_feature 8..11: note = RNA
  misc_feature 13: note = RNA
  misc_feature 15..23: note = RNA
  misc_feature 2: note = DNA
  misc_feature 5: note = DNA
  misc_feature 7: note = DNA
  misc_feature 12: note = DNA
  misc_feature 14: note = DNA
ttgctgacaaacaccacgtctcc

SEQ ID NO: 576 - DNA, 23 bp, synthetic construct
  source 1..23: mol_type = other DNA
  modified_base 1: mod_base = OTHER; note = 2'-O-methyladenosine-3'-phosphorothioate
  modified_base 2: mod_base = OTHER; note = 2'-deoxyguanosine-3'-phosphorothioate
  modified_base 3: mod_base = OTHER; note = 2'-O-methyluridine-3'-phosphate
  modified_base 4: mod_base = OTHER; note = 2'-O-methylcytidine-3'-phosphate
  modified_base 6: mod_base = OTHER; note = 2'-O-methyladenosine-3'-phosphate
  modified_base 8: mod_base = OTHER; note = 2'-O-methylcytidine-3'-phosphate
  modified_base 9: mod_base = OTHER; note = 2'-O-methylcytidine-3'-phosphate
  modified_base 10: mod_base = OTHER; note = 2'-O-methylguanosine-3'-phosphate
  modified_base 11: mod_base = OTHER; note = 2'-O-methylcytidine-3'-phosphate
  modified_base 13: mod_base = OTHER; note = 2'-O-methylguanosine-3'-phosphate
  modified_base 15: mod_base = OTHER; note = 2'-O-methyladenosine-3'-phosphate
  modified_base 16: mod_base = OTHER; note = 2'-O-methylguanosine-3'-phosphate
  modified_base 17: mod_base = OTHER; note = 2'-O-methylcytidine-3'-phosphate
  modified_base 18: mod_base = OTHER; note = 2'-O-methyladenosine-3'-phosphate
  modified_base 19: mod_base = OTHER; note = 2'-O-methyluridine-3'-phosphate
  modified_base 20: mod_base = OTHER; note = 2'-O-methylcytidine-3'-phosphate
  modified_base 21: mod_base = OTHER; note = 2'-O-methyluridine-3'-phosphorothioate
  modified_base 22: mod_base = OTHER; note = 2'-O-methyluridine-3'-phosphorothioate
  modified_base 23: mod_base = OTHER; note = 2'-O-methylcytidine
  misc_feature 1: note = RNA
  misc_feature 3..4: note = RNA
  misc_feature 6: note = RNA
  misc_feature 8..11: note = RNA
  misc_feature 13: note = RNA
  misc_feature 15..23: note = RNA
  misc_feature 2: note = DNA
  misc_feature 5: note = DNA
  misc_feature 7: note = DNA
  misc_feature 12: note = DNA
  misc_feature 14: note = DNA
agtctatccgctgcagcatcttc

SEQ ID NO: 577 - DNA, 23 bp, synthetic construct
  source 1..23: mol_type = other DNA
  modified_base 1: mod_base = OTHER; note = 2'-O-methyladenosine-3'-phosphorothioate
  modified_base 2: mod_base = OTHER; note = 2'-deoxycytidine-3'-phosphorothioate
  modified_base 3: mod_base = OTHER; note = 2'-O-methyladenosine-3'-phosphate
  modified_base 4: mod_base = OTHER; note = 2'-O-methylcytidine-3'-phosphate
  modified_base 6: mod_base = OTHER; note = 2'-O-methylcytidine-3'-phosphate
  modified_base 8: mod_base = OTHER; note = 2'-O-methylcytidine-3'-phosphate
  modified_base 9: mod_base = OTHER; note = 2'-O-methyladenosine-3'-phosphate
  modified_base 10: mod_base = OTHER; note = 2'-O-methylguanosine-3'-phosphate
  modified_base 11: mod_base = OTHER; note = 2'-O-methylguanosine-3'-phosphate
  modified_base 13: mod_base = OTHER; note = 2'-O-methyluridine-3'-phosphate
  modified_base 15: mod_base = OTHER; note = 2'-O-methyluridine-3'-phosphate
  modified_base 16: mod_base = OTHER; note = 2'-O-methylguanosine-3'-phosphate
  modified_base 17: mod_base = OTHER; note = 2'-O-methylcytidine-3'-phosphate
  modified_base 18: mod_base = OTHER; note = 2'-O-methyluridine-3'-phosphate
  modified_base 19: mod_base = OTHER; note = 2'-O-methyluridine-3'-phosphate
  modified_base 20: mod_base = OTHER; note = 2'-O-methylcytidine-3'-phosphate
  modified_base 21: mod_base = OTHER; note = 2'-O-methyluridine-3'-phosphorothioate
  modified_base 22: mod_base = OTHER; note = 2'-O-methylcytidine-3'-phosphorothioate
  modified_base 23: mod_base = OTHER; note = 2'-O-methyluridine
  misc_feature 1: note = RNA
  misc_feature 3..4: note = RNA
  misc_feature 6: note = RNA
  misc_feature 8..11: note = RNA
  misc_feature 13: note = RNA
  misc_feature 15..23: note = RNA
  misc_feature 2: note = DNA
  misc_feature 5: note = DNA
  misc_feature 7: note = DNA
  misc_feature 12: note = DNA
  misc_feature 14: note = DNA
acacgcacaggatctgcttctct

SEQ ID NO: 578 - DNA, 23 bp, synthetic construct
  source 1..23: mol_type = other DNA
  modified_base 1: mod_base = OTHER; note = 2'-O-methyluridine-3'-phosphorothioate
  modified_base 2: mod_base = OTHER; note = 2'-deoxycytidine-3'-phosphorothioate
  modified_base 3: mod_base = OTHER; note = 2'-O-methylcytidine-3'-phosphate
  modified_base 4: mod_base = OTHER; note = 2'-O-methyluridine-3'-phosphate
  modified_base 6: mod_base = OTHER; note = 2'-O-methyladenosine-3'-phosphate
  modified_base 8: mod_base = OTHER; note = 2'-O-methyladenosine-3'-phosphate
  modified_base 9: mod_base = OTHER; note = 2'-O-methylcytidine-3'-phosphate
  modified_base 10: mod_base = OTHER; note = 2'-O-methylguanosine-3'-phosphate
  modified_base 11: mod_base = OTHER; note = 2'-O-methyladenosine-3'-phosphate
  modified_base 13: mod_base = OTHER; note = 2'-O-methylcytidine-3'-phosphate
  modified_base 15: mod_base = OTHER; note = 2'-O-methyluridine-3'-phosphate
  modified_base 16: mod_base = OTHER; note = 2'-O-methyladenosine-3'-phosphate
  modified_base 17: mod_base = OTHER; note = 2'-O-methylcytidine-3'-phosphate
  modified_base 18: mod_base = OTHER; note = 2'-O-methyladenosine-3'-phosphate
  modified_base 19: mod_base = OTHER; note = 2'-O-methyladenosine-3'-phosphate
  modified_base 20: mod_base = OTHER; note = 2'-O-methylguanosine-3'-phosphate
  modified_base 21: mod_base = OTHER; note = 2'-O-methylcytidine-3'-phosphorothioate
  modified_base 22: mod_base = OTHER; note = 2'-O-methylcytidine-3'-phosphorothioate
  modified_base 23: mod_base = OTHER; note = 2'-O-methylcytidine
  misc_feature 1: note = RNA
  misc_feature 3..4: note = RNA
  misc_feature 6: note = RNA
  misc_feature 8..11: note = RNA
  misc_feature 13: note = RNA
  misc_feature 15..23: note = RNA
  misc_feature 2: note = DNA
  misc_feature 5: note = DNA
  misc_feature 7: note = DNA
  misc_feature 12: note = DNA
  misc_feature 14: note = DNA
tcctcacacgaccatacaagccc

SEQ ID NO: 579 - DNA, 23 bp, synthetic construct
  source 1..23: mol_type = other DNA
  modified_base 1: mod_base = OTHER; note = 2'-O-methyladenosine-3'-phosphorothioate
  modified_base 2: mod_base = OTHER; note = 2'-deoxycytidine-3'-phosphorothioate
  modified_base 3: mod_base = OTHER; note = 2'-O-methylguanosine-3'-phosphate
  modified_base 4: mod_base = OTHER; note = 2'-O-methylguanosine-3'-phosphate
  modified_base 6: mod_base = OTHER; note = 2'-O-methyluridine-3'-phosphate
  modified_base 8: mod_base = OTHER; note = 2'-O-methyladenosine-3'-phosphate
  modified_base 9: mod_base = OTHER; note = 2'-O-methylguanosine-3'-phosphate
  modified_base 10: mod_base = OTHER; note = 2'-O-methylcytidine-3'-phosphate
  modified_base 11: mod_base = OTHER; note = 2'-O-methylguanosine-3'-phosphate
  modified_base 13: mod_base = OTHER; note = 2'-O-methyluridine-3'-phosphate
  modified_base 15: mod_base = OTHER; note = 2'-O-methyluridine-3'-phosphate
  modified_base 16: mod_base = OTHER; note = 2'-O-methylcytidine-3'-phosphate
  modified_base 17: mod_base = OTHER; note = 2'-O-methylguanosine-3'-phosphate
  modified_base 18: mod_base = OTHER; note = 2'-O-methyladenosine-3'-phosphate
  modified_base 19: mod_base = OTHER; note = 2'-O-methylguanosine-3'-phosphate
  modified_base 20: mod_base = OTHER; note = 2'-O-methyladenosine-3'-phosphate
  modified_base 21: mod_base = OTHER; note = 2'-O-methyladenosine-3'-phosphorothioate
  modified_base 22: mod_base = OTHER; note = 2'-O-methyluridine-3'-phosphorothioate
  modified_base 23: mod_base = OTHER; note = 2'-O-methylguanosine
  misc_feature 1: note = RNA
  misc_feature 3..4: note = RNA
  misc_feature 6: note = RNA
  misc_feature 8..11: note = RNA
  misc_feature 13: note = RNA
  misc_feature 15..23: note = RNA
  misc_feature 2: note = DNA
  misc_feature 5: note = DNA
  misc_feature 7: note = DNA
  misc_feature 12: note = DNA
  misc_feature 14: note = DNA
acggctaagcgatctcgagaatg

SEQ ID NO: 580 - DNA, 23 bp, synthetic construct
  source 1..23: mol_type = other DNA
  modified_base 1: mod_base = OTHER; note = 2'-O-methyluridine-3'-phosphorothioate
  modified_base 2: mod_base = OTHER; note = 2'-deoxyguanosine-3'-phosphorothioate
  modified_base 3: mod_base = OTHER; note = 2'-O-methylguanosine-3'-phosphate
  modified_base 4: mod_base = OTHER; note = 2'-O-methylguanosine-3'-phosphate
  modified_base 6: mod_base = OTHER; note = 2'-O-methylcytidine-3'-phosphate
  modified_base 8: mod_base = OTHER; note = 2'-O-methylguanosine-3'-phosphate
  modified_base 9: mod_base = OTHER; note = 2'-O-methyladenosine-3'-phosphate
  modified_base 10: mod_base = OTHER; note = 2'-O-methyluridine-3'-phosphate
  modified_base 11: mod_base = OTHER; note = 2'-O-methylcytidine-3'-phosphate
  modified_base 13: mod_base = OTHER; note = 2'-O-methyladenosine-3'-phosphate
  modified_base 15: mod_base = OTHER; note = 2'-O-methylcytidine-3'-phosphate
  modified_base 16: mod_base = OTHER; note = 2'-O-methyluridine-3'-phosphate
  modified_base 17: mod_base = OTHER; note = 2'-O-methyluridine-3'-phosphate
  modified_base 18: mod_base = OTHER; note = 2'-O-methylcytidine-3'-phosphate
  modified_base 19: mod_base = OTHER; note = 2'-O-methyluridine-3'-phosphate
  modified_base 20: mod_base = OTHER; note = 2'-O-methylcytidine-3'-phosphate
  modified_base 21: mod_base = OTHER; note = 2'-O-methyladenosine-3'-phosphorothioate
  modified_base 22: mod_base = OTHER; note = 2'-O-methyladenosine-3'-phosphorothioate
  modified_base 23: mod_base = OTHER; note = 2'-O-methyladenosine
  misc_feature 1: note = RNA
  misc_feature 3..4: note = RNA
  misc_feature 6: note = RNA
  misc_feature 8..11: note = RNA
  misc_feature 13: note = RNA
  misc_feature 15..23: note = RNA
  misc_feature 2: note = DNA
  misc_feature 5: note = DNA
  misc_feature 7: note = DNA
  misc_feature 12: note = DNA
  misc_feature 14: note = DNA
tgggtcagatcaaccttctcaaa

SEQ ID NO: 581 - DNA, 23 bp, synthetic construct
  source 1..23: mol_type = other DNA
  modified_base 1: mod_base = OTHER; note = 2'-O-methyluridine-3'-phosphorothioate
  modified_base 2: mod_base = OTHER; note = 2'-deoxyadenosine-3'-phosphorothioate
  modified_base 3: mod_base = OTHER; note = 2'-O-methyladenosine-3'-phosphate
  modified_base 4: mod_base = OTHER; note = 2'-O-methylguanosine-3'-phosphate
  modified_base 6: mod_base = OTHER; note = 2'-O-methylguanosine-3'-phosphate
  modified_base 8: mod_base = OTHER; note = 2'-O-methyluridine-3'-phosphate
  modified_base 9: mod_base = OTHER; note = 2'-O-methylcytidine-3'-phosphate
  modified_base 10: mod_base = OTHER; note = 2'-O-methyluridine-3'-phosphate
  modified_base 11: mod_base = OTHER; note = 2'-O-methylcytidine-3'-phosphate
  modified_base 13: mod_base = OTHER; note = 2'-O-methyladenosine-3'-phosphate
  modified_base 15: mod_base = OTHER; note = 2'-O-methyladenosine-3'-phosphate
  modified_base 16: mod_base = OTHER; note = 2'-O-methyladenosine-3'-phosphate
  modified_base 17: mod_base = OTHER; note = 2'-O-methyluridine-3'-phosphate
  modified_base 18: mod_base = OTHER; note = 2'-O-methylguanosine-3'-phosphate
  modified_base 19: mod_base = OTHER; note = 2'-O-methylcytidine-3'-phosphate
  modified_base 20: mod_base = OTHER; note = 2'-O-methyladenosine-3'-phosphate
  modified_base 21: mod_base = OTHER; note = 2'-O-methyladenosine-3'-phosphorothioate
  modified_base 22: mod_base = OTHER; note = 2'-O-methyladenosine-3'-phosphorothioate
  modified_base 23: mod_base = OTHER; note = 2'-O-methylguanosine
  misc_feature 1: note = RNA
  misc_feature 3..4: note = RNA
  misc_feature 6: note = RNA
  misc_feature 8..11: note = RNA
  misc_feature 13: note = RNA
  misc_feature 15..23: note = RNA
  misc_feature 2: note = DNA
  misc_feature 5: note = DNA
  misc_feature 7: note = DNA
  misc_feature 12: note = DNA
  misc_feature 14: note = DNA
taagcgatctcgagaatgcaaag

SEQ ID NO: 582 - DNA, 23 bp, synthetic construct
  source 1..23: mol_type = other DNA
  modified_base 1: mod_base = OTHER; note = 2'-O-methyladenosine-3'-phosphorothioate
  modified_base 2: mod_base = OTHER; note = 2'-deoxyadenosine-3'-phosphorothioate
  modified_base 3: mod_base = OTHER; note = 2'-O-methyladenosine-3'-phosphate
  modified_base 4: mod_base = OTHER; note = 2'-O-methyluridine-3'-phosphate
  modified_base 6: mod_base = OTHER; note = 2'-O-methylguanosine-3'-phosphate
  modified_base 8: mod_base = OTHER; note = 2'-O-methylguanosine-3'-phosphate
  modified_base 9: mod_base = OTHER; note = 2'-O-methyluridine-3'-phosphate
  modified_base 10: mod_base = OTHER; note = 2'-O-methylcytidine-3'-phosphate
  modified_base 11: mod_base = OTHER; note = 2'-O-methyluridine-3'-phosphate
  modified_base 13: mod_base = OTHER; note = 2'-O-methylcytidine-3'-phosphate
  modified_base 15: mod_base = OTHER; note = 2'-O-methylcytidine-3'-phosphate
  modified_base 16: mod_base = OTHER; note = 2'-O-methyladenosine-3'-phosphate
  modified_base 17: mod_base = OTHER; note = 2'-O-methyladenosine-3'-phosphate
  modified_base 18: mod_base = OTHER; note = 2'-O-methylcytidine-3'-phosphate
  modified_base 19: mod_base = OTHER; note = 2'-O-methylguanosine-3'-phosphate
  modified_base 20: mod_base = OTHER; note = 2'-O-methylcytidine-3'-phosphate
  modified_base 21: mod_base = OTHER; note = 2'-O-methyladenosine-3'-phosphorothioate
  modified_base 22: mod_base = OTHER; note = 2'-O-methylguanosine-3'-phosphorothioate
  modified_base 23: mod_base = OTHER; note = 2'-O-methylguanosine
  misc_feature 1: note = RNA
  misc_feature 3..4: note = RNA
  misc_feature 6: note = RNA
  misc_feature 8..11: note = RNA
  misc_feature 13: note = RNA
  misc_feature 15..23: note = RNA
  misc_feature 2: note = DNA
  misc_feature 5: note = DNA
  misc_feature 7: note = DNA
  misc_feature 12: note = DNA
  misc_feature 14: note = DNA
aaatagagtctgcacaacgcagg

SEQ ID NO: 583 - DNA, 23 bp, synthetic construct
  source 1..23: mol_type = other DNA
  modified_base 1: mod_base = OTHER; note = 2'-O-methyladenosine-3'-phosphorothioate
  modified_base 2: mod_base = OTHER; note = 2'-deoxyadenosine-3'-phosphorothioate
  modified_base 3: mod_base = OTHER; note = 2'-O-methylguanosine-3'-phosphate
  modified_base 4: mod_base = OTHER; note = 2'-O-methyladenosine-3'-phosphate
  modified_base 6: mod_base = OTHER; note = 2'-O-methylcytidine-3'-phosphate
  modified_base 8: mod_base = OTHER; note = 2'-O-methylguanosine-3'-phosphate
  modified_base 9: mod_base = OTHER; note = 2'-O-methyluridine-3'-phosphate
  modified_base 10: mod_base = OTHER; note = 2'-O-methylguanosine-3'-phosphate
  modified_base 11: mod_base = OTHER; note = 2'-O-methylcytidine-3'-phosphate
  modified_base 13: mod_base = OTHER; note = 2'-O-methylguanosine-3'-phosphate
  modified_base 15: mod_base = OTHER; note = 2'-O-methyladenosine-3'-phosphate
  modified_base 16: mod_base = OTHER; note = 2'-O-methylguanosine-3'-phosphate
  modified_base 17: mod_base = OTHER; note = 2'-O-methyluridine-3'-phosphate
  modified_base 18: mod_base = OTHER; note = 2'-O-methyluridine-3'-phosphate
  modified_base 19: mod_base = OTHER; note = 2'-O-methylguanosine-3'-phosphate
  modified_base 20: mod_base = OTHER; note = 2'-O-methylguanosine-3'-phosphate
  modified_base 21: mod_base = OTHER; note = 2'-O-methyladenosine-3'-phosphorothioate
  modified_base 22: mod_base = OTHER; note = 2'-O-methylcytidine-3'-phosphorothioate
  modified_base 23: mod_base = OTHER; note = 2'-O-methylguanosine
  misc_feature 1: note = RNA
  misc_feature 3..4: note = RNA
  misc_feature 6: note = RNA
  misc_feature 8..11: note = RNA
  misc_feature 13: note = RNA
  misc_feature 15..23: note = RNA
  misc_feature 2: note = DNA
  misc_feature 5: note = DNA
  misc_feature 7: note = DNA
  misc_feature 12: note = DNA
  misc_feature 14: note = DNA
aagaacggtgcaggagttggacg

SEQ ID NO: 584 - DNA, 23 bp, synthetic construct
  source 1..23: mol_type = other DNA
  modified_base 1: mod_base = OTHER; note = 2'-O-methyladenosine-3'-phosphorothioate
  modified_base 2: mod_base = OTHER; note = 2'-deoxyadenosine-3'-phosphorothioate
  modified_base 3: mod_base = OTHER; note = 2'-O-methyladenosine-3'-phosphate
  modified_base 4: mod_base = OTHER; note = 2'-O-methylguanosine-3'-phosphate
  modified_base 6: mod_base = OTHER; note = 2'-O-methylguanosine-3'-phosphate
  modified_base 8: mod_base = OTHER; note = 2'-O-methylguanosine-3'-phosphate
  modified_base 9: mod_base = OTHER; note = 2'-O-methylguanosine-3'-phosphate
  modified_base 10: mod_base = OTHER; note = 2'-O-methylcytidine-3'-phosphate
  modified_base 11: mod_base = OTHER; note = 2'-O-methyluridine-3'-phosphate
  modified_base 13: mod_base = OTHER; note = 2'-O-methyladenosine-3'-phosphate
  modified_base 15: mod_base = OTHER; note = 2'-O-methylcytidine-3'-phosphate
  modified_base 16: mod_base = OTHER; note = 2'-O-methylguanosine-3'-phosphate
  modified_base 17: mod_base = OTHER; note = 2'-O-methyladenosine-3'-phosphate
  modified_base 18: mod_base = OTHER; note = 2'-O-methyluridine-3'-phosphate
  modified_base 19: mod_base = OTHER; note = 2'-O-methylcytidine-3'-phosphate
  modified_base 20: mod_base = OTHER; note = 2'-O-methyluridine-3'-phosphate
  modified_base 21: mod_base = OTHER; note = 2'-O-methylcytidine-3'-phosphorothioate
  modified_base 22: mod_base = OTHER; note = 2'-O-methylguanosine-3'-phosphorothioate
  modified_base 23: mod_base = OTHER; note = 2'-O-methyladenosine
  misc_feature 1: note = RNA
  misc_feature 3..4: note = RNA
  misc_feature 6: note = RNA
  misc_feature 8..11: note = RNA
  misc_feature 13: note = RNA
  misc_feature 15..23: note = RNA
  misc_feature 2: note = DNA
  misc_feature 5: note = DNA
  misc_feature 7: note = DNA
  misc_feature 12: note = DNA
  misc_feature 14: note = DNA
aaagcgcggctaagcgatctcga

SEQ ID NO: 585 - DNA, 23 bp, synthetic construct
  source 1..23: mol_type = other DNA
  modified_base 1: mod_base = OTHER; note = 2'-O-methyladenosine-3'-phosphorothioate
  modified_base 2: mod_base = OTHER; note = 2'-deoxyadenosine-3'-phosphorothioate
  modified_base 3: mod_base = OTHER; note = 2'-O-methylcytidine-3'-phosphate
  modified_base 4: mod_base = OTHER; note = 2'-O-methylguanosine-3'-phosphate
  modified_base 6: mod_base = OTHER; note = 2'-O-methylcytidine-3'-phosphate
  modified_base 8: mod_base = OTHER; note = 2'-O-methylcytidine-3'-phosphate
  modified_base 9: mod_base = OTHER; note = 2'-O-methylcytidine-3'-phosphate
  modified_base 10: mod_base = OTHER; note = 2'-O-methylguanosine-3'-phosphate
  modified_base 11: mod_base = OTHER; note = 2'-O-methyluridine-3'-phosphate
  modified_base 13: mod_base = OTHER; note = 2'-O-methylguanosine-3'-phosphate
  modified_base 15: mod_base = OTHER; note = 2'-O-methylcytidine-3'-phosphate
  modified_base 16: mod_base = OTHER; note = 2'-O-methyladenosine-3'-phosphate
  modified_base 17: mod_base = OTHER; note = 2'-O-methyladenosine-3'-phosphate
  modified_base 18: mod_base = OTHER; note = 2'-O-methyladenosine-3'-phosphate
  modified_base 19: mod_base = OTHER; note = 2'-O-methylcytidine-3'-phosphate
  modified_base 20: mod_base = OTHER; note = 2'-O-methyladenosine-3'-phosphate
  modified_base 21: mod_base = OTHER; note = 2'-O-methylguanosine-3'-phosphorothioate
  modified_base 22: mod_base = OTHER; note = 2'-O-methylcytidine-3'-phosphorothioate
  modified_base 23: mod_base = OTHER; note = 2'-O-methyluridine
  misc_feature 1: note = RNA
  misc_feature 3..4: note = RNA
  misc_feature 6: note = RNA
  misc_feature 8..11: note = RNA
  misc_feature 13: note = RNA
  misc_feature 15..23: note = RNA
  misc_feature 2: note = DNA
  misc_feature 5: note = DNA
  misc_feature 7: note = DNA
  misc_feature 12: note = DNA
  misc_feature 14: note = DNA
aacgtctccgtagccaaacagct

SEQ ID NO: 586 - DNA, 23 bp, synthetic construct
  source 1..23: mol_type = other DNA
  modified_base 1: mod_base = OTHER; note = 2'-O-methyladenosine-3'-phosphorothioate
  modified_base 2: mod_base = OTHER; note = 2'-deoxyadenosine-3'-phosphorothioate
  modified_base 3: mod_base = OTHER; note = 2'-O-methyluridine-3'-phosphate
  modified_base 4: mod_base = OTHER; note = 2'-O-methyluridine-3'-phosphate
  modified_base 6: mod_base = OTHER; note = 2'-O-methyladenosine-3'-phosphate
  modified_base 8: mod_base = OTHER; note = 2'-O-methylguanosine-3'-phosphate
  modified_base 9: mod_base = OTHER; note = 2'-O-methylguanosine-3'-phosphate
  modified_base 10: mod_base = OTHER; note = 2'-O-methyluridine-3'-phosphate
  modified_base 11: mod_base = OTHER; note = 2'-O-methylguanosine-3'-phosphate
  modified_base 13: mod_base = OTHER; note = 2'-O-methylcytidine-3'-phosphate
  modified_base 15: mod_base = OTHER; note = 2'-O-methylcytidine-3'-phosphate
  modified_base 16: mod_base = OTHER; note = 2'-O-methylcytidine-3'-phosphate
  modified_base 17: mod_base = OTHER; note = 2'-O-methyladenosine-3'-phosphate
  modified_base 18: mod_base = OTHER; note = 2'-O-methylguanosine-3'-phosphate
  modified_base 19: mod_base = OTHER; note = 2'-O-methylcytidine-3'-phosphate
  modified_base 20: mod_base = OTHER; note = 2'-O-methyluridine-3'-phosphate
  modified_base 21: mod_base = OTHER; note = 2'-O-methylcytidine-3'-phosphorothioate
  modified_base 22: mod_base = OTHER; note = 2'-O-methylcytidine-3'-phosphorothioate
  modified_base 23: mod_base = OTHER; note = 2'-O-methylcytidine
  misc_feature 1: note = RNA
  misc_feature 3..4: note = RNA
  misc_feature 6: note = RNA
  misc_feature 8..11: note = RNA
  misc_feature 13: note = RNA
  misc_feature 15..23: note = RNA
  misc_feature 2: note = DNA
  misc_feature 5: note = DNA
  misc_feature 7: note = DNA
  misc_feature 12: note = DNA
  misc_feature 14: note = DNA
aattgaaggtgtctccagctccc

SEQ ID NO: 587 - DNA, 23 bp, synthetic construct
  source 1..23: mol_type = other DNA
  modified_base 1: mod_base = OTHER; note = 2'-O-methyladenosine-3'-phosphorothioate
  modified_base 2: mod_base = OTHER; note = 2'-deoxyadenosine-3'-phosphorothioate
  modified_base 3: mod_base = OTHER; note = 2'-O-methylcytidine-3'-phosphate
  modified_base 4: mod_base = OTHER; note = 2'-O-methylguanosine-3'-phosphate
  modified_base 6: mod_base = OTHER; note = 2'-O-methylcytidine-3'-phosphate
  modified_base 8: mod_base = OTHER; note = 2'-O-methylcytidine-3'-phosphate
  modified_base 9: mod_base = OTHER; note = 2'-O-methylcytidine-3'-phosphate
  modified_base 10: mod_base = OTHER; note = 2'-O-methylcytidine-3'-phosphate
  modified_base 11: mod_base = OTHER; note = 2'-O-methyladenosine-3'-phosphate
  modified_base 13: mod_base = OTHER; note = 2'-O-methyluridine-3'-phosphate
  modified_base 15: mod_base = OTHER; note = 2'-O-methylcytidine-3'-phosphate
  modified_base 16: mod_base = OTHER; note = 2'-O-methyluridine-3'-phosphate
  modified_base 17: mod_base = OTHER; note = 2'-O-methylcytidine-3'-phosphate
  modified_base 18: mod_base = OTHER; note = 2'-O-methyladenosine-3'-phosphate
  modified_base 19: mod_base = OTHER; note = 2'-O-methylguanosine-3'-phosphate
  modified_base 20: mod_base = OTHER; note = 2'-O-methylcytidine-3'-phosphate
  modified_base 21: mod_base = OTHER; note = 2'-O-methylcytidine-3'-phosphorothioate
  modified_base 22: mod_base = OTHER; note = 2'-O-methyluridine-3'-phosphorothioate
  modified_base 23: mod_base = OTHER; note = 2'-O-methyluridine
  misc_feature 1: note = RNA
  misc_feature 3..4: note = RNA
  misc_feature 6: note = RNA
  misc_feature 8..11: note = RNA
  misc_feature 13: note = RNA
  misc_feature 15..23: note = RNA
  misc_feature 2: note = DNA
  misc_feature 5: note = DNA
  misc_feature 7: note = DNA
  misc_feature 12: note = DNA
  misc_feature 14: note = DNA
aacgcctcccacttctcagcctt

SEQ ID NO: 588 - DNA, 23 bp, synthetic construct
  source 1..23: mol_type = other DNA
  modified_base 1: mod_base = OTHER; note = 2'-O-methyluridine-3'-phosphorothioate
  modified_base 2: mod_base = OTHER; note = 2'-deoxyguanosine-3'-phosphorothioate
  modified_base 3: mod_base = OTHER; note = 2'-O-methylcytidine-3'-phosphate
  modified_base 4: mod_base = OTHER; note = 2'-O-methyluridine-3'-phosphate
  modified_base 6: mod_base = OTHER; note = 2'-O-methyladenosine-3'-phosphate
  modified_base 8: mod_base = OTHER; note = 2'-O-methyladenosine-3'-phosphate
  modified_base 9: mod_base = OTHER; note = 2'-O-methyladenosine-3'-phosphate
  modified_base 10: mod_base = OTHER; note = 2'-O-methyladenosine-3'-phosphate
  modified_base 11: mod_base = OTHER; note = 2'-O-methylcytidine-3'-phosphate
  modified_base 13: mod_base = OTHER; note = 2'-O-methylcytidine-3'-phosphate
  modified_base 15: mod_base = OTHER; note = 2'-O-methyladenosine-3'-phosphate
  modified_base 16: mod_base = OTHER; note = 2'-O-methylcytidine-3'-phosphate
  modified_base 17: mod_base = OTHER; note = 2'-O-methylguanosine-3'-phosphate
  modified_base 18: mod_base = OTHER; note = 2'-O-methyluridine-3'-phosphate
  modified_base 19: mod_base = OTHER; note = 2'-O-methylcytidine-3'-phosphate
  modified_base 20: mod_base = OTHER; note = 2'-O-methyluridine-3'-phosphate
  modified_base 21: mod_base = OTHER; note = 2'-O-methylcytidine-3'-phosphorothioate
  modified_base 22: mod_base = OTHER; note = 2'-O-methylcytidine-3'-phosphorothioate
  modified_base 23: mod_base = OTHER; note = 2'-O-methylguanosine
  misc_feature 1: note = RNA
  misc_feature 3..4: note = RNA
  misc_feature 6: note = RNA
  misc_feature 8..11: note = RNA
  misc_feature 13: note = RNA
  misc_feature 15..23: note = RNA
  misc_feature 2: note = DNA
  misc_feature 5: note = DNA
  misc_feature 7: note = DNA
  misc_feature 12: note = DNA
  misc_feature 14: note = DNA
tgctgacaaacaccacgtctccg

SEQ ID NO: 589 - DNA, 23 bp, synthetic construct
  source 1..23: mol_type = other DNA
  modified_base 1: mod_base = OTHER; note = 2'-O-methyladenosine-3'-phosphorothioate
  modified_base 2: mod_base = OTHER; note = 2'-deoxycytidine-3'-phosphorothioate
  modified_base 3: mod_base = OTHER; note = 2'-O-methylguanosine-3'-phosphate
  modified_base 4: mod_base = OTHER; note = 2'-O-methylcytidine-3'-phosphate
  modified_base 6: mod_base = OTHER; note = 2'-O-methylcytidine-3'-phosphate
  modified_base 8: mod_base = OTHER; note = 2'-O-methylguanosine-3'-phosphate
  modified_base 9: mod_base = OTHER; note = 2'-O-methylguanosine-3'-phosphate
  modified_base 10: mod_base = OTHER; note = 2'-O-methyladenosine-3'-phosphate
  modified_base 11: mod_base = OTHER; note = 2'-O-methyluridine-3'-phosphate
  modified_base 13: mod_base = OTHER; note = 2'-O-methyluridine-3'-phosphate
  modified_base 15: mod_base = OTHER; note = 2'-O-methylcytidine-3'-phosphate
  modified_base 16: mod_base = OTHER; note = 2'-O-methyluridine-3'-phosphate
  modified_base 17: mod_base = OTHER; note = 2'-O-methyluridine-3'-phosphate
  modified_base 18: mod_base = OTHER; note = 2'-O-methylcytidine-3'-phosphate
  modified_base 19: mod_base = OTHER; note = 2'-O-methyluridine-3'-phosphate
  modified_base 20: mod_base = OTHER; note = 2'-O-methylcytidine-3'-phosphate
  modified_base 21: mod_base = OTHER; note = 2'-O-methyluridine-3'-phosphorothioate
  modified_base 22: mod_base = OTHER; note = 2'-O-methyluridine-3'-phosphorothioate
  modified_base 23: mod_base = OTHER; note = 2'-O-methylcytidine
  misc_feature 1: note = RNA
  misc_feature 3..4: note = RNA
  misc_feature 6: note = RNA
  misc_feature 8..11: note = RNA
  misc_feature 13: note = RNA
  misc_feature 15..23: note = RNA
  misc_feature 2: note = DNA
  misc_feature 5: note = DNA
  misc_feature 7: note = DNA
  misc_feature 12: note = DNA
  misc_feature 14: note = DNA
acgcacaggatctgcttctcttc

SEQ ID NO: 590 - DNA, 23 bp, synthetic construct
  source 1..23: mol_type = other DNA
  modified_base 1: mod_base = OTHER; note = 2'-O-methyladenosine-3'-phosphorothioate
  modified_base 2: mod_base = OTHER; note = 2'-deoxythymidine-3'-phosphorothioate
  modified_base 3: mod_base = OTHER; note = 2'-O-methylcytidine-3'-phosphate
  modified_base 4: mod_base = OTHER; note = 2'-O-methylguanosine-3'-phosphate
  modified_base 6: mod_base = OTHER; note = 2'-O-methylguanosine-3'-phosphate
  modified_base 8: mod_base = OTHER; note = 2'-O-methyladenosine-3'-phosphate
  modified_base 9: mod_base = OTHER; note = 2'-O-methyluridine-3'-phosphate
  modified_base 10: mod_base = OTHER; note = 2'-O-methylguanosine-3'-phosphate
  modified_base 11: mod_base = OTHER; note = 2'-O-methylcytidine-3'-phosphate
  modified_base 13: mod_base = OTHER; note = 2'-O-methyladenosine-3'-phosphate
  modified_base 15: mod_base = OTHER; note = 2'-O-methylguanosine-3'-phosphate
  modified_base 16: mod_base = OTHER; note = 2'-O-methyladenosine-3'-phosphate
  modified_base 17: mod_base = OTHER; note = 2'-O-methylguanosine-3'-phosphate
  modified_base 18: mod_base = OTHER; note = 2'-O-methyladenosine-3'-phosphate
  modified_base 19: mod_base = OTHER; note = 2'-O-methyladenosine-3'-phosphate
  modified_base 20: mod_base = OTHER; note = 2'-O-methyladenosine-3'-phosphate
  modified_base 21: mod_base = OTHER; note = 2'-O-methyladenosine-3'-phosphorothioate
  modified_base 22: mod_base = OTHER; note = 2'-O-methyluridine-3'-phosphorothioate
  modified_base 23: mod_base = OTHER; note = 2'-O-methylguanosine
  misc_feature 1: note = RNA
  misc_feature 3..4: note = RNA
  misc_feature 6: note = RNA
  misc_feature 8..11: note = RNA
  misc_feature 13: note = RNA
  misc_feature 15..23: note = RNA
  misc_feature 2: note = DNA
  misc_feature 5: note = DNA
  misc_feature 7: note = DNA
  misc_feature 12: note = DNA
  misc_feature 14: note = DNA
atcgagaatgcaaagagaaaatg

SEQ ID NO: 591 - DNA, 23 bp, synthetic construct
  source 1..23: mol_type = other DNA
  modified_base 1: mod_base = OTHER; note = 2'-O-methyladenosine-3'-phosphorothioate
  modified_base 2: mod_base = OTHER; note = 2'-deoxythymidine-3'-phosphorothioate
  modified_base 3: mod_base = OTHER; note = 2'-O-methyluridine-3'-phosphate
  modified_base 4: mod_base = OTHER; note = 2'-O-methyladenosine-3'-phosphate
  modified_base 6: mod_base = OTHER; note = 2'-O-methyluridine-3'-phosphate
  modified_base 8: mod_base = OTHER; note = 2'-O-methylcytidine-3'-phosphate
  modified_base 9: mod_base = OTHER; note = 2'-O-methylcytidine-3'-phosphate
  modified_base 10: mod_base = OTHER; note = 2'-O-methyladenosine-3'-phosphate
  modified_base 11: mod_base = OTHER; note = 2'-O-methyladenosine-3'-phosphate
  modified_base 13: mod_base = OTHER; note = 2'-O-methylguanosine-3'-phosphate
  modified_base 15: mod_base = OTHER; note = 2'-O-methylguanosine-3'-phosphate
  modified_base 16: mod_base = OTHER; note = 2'-O-methylguanosine-3'-phosphate
  modified_base 17: mod_base = OTHER; note = 2'-O-methylguanosine-3'-phosphate
  modified_base 18: mod_base = OTHER; note = 2'-O-methylcytidine-3'-phosphate
  modified_base 19: mod_base = OTHER; note = 2'-O-methyluridine-3'-phosphate
  modified_base 20: mod_base = OTHER; note = 2'-O-methylcytidine-3'-phosphate
  modified_base 21: mod_base = OTHER; note = 2'-O-methylcytidine-3'-phosphorothioate
  modified_base 22: mod_base = OTHER; note = 2'-O-methyladenosine-3'-phosphorothioate
  modified_base 23: mod_base = OTHER; note = 2'-O-methyladenosine
  misc_feature 1: note = RNA
  misc_feature 3..4: note = RNA
  misc_feature 6: note = RNA
  misc_feature 8..11: note = RNA
  misc_feature 13: note = RNA
  misc_feature 15..23: note = RNA
  misc_feature 2: note = DNA
  misc_feature 5: note = DNA
  misc_feature 7: note = DNA
  misc_feature 12: note = DNA
  misc_feature 14: note = DNA
attaattccaaggtgggctccaa

SEQ ID NO: 592 - DNA, 23 bp, synthetic construct
  source 1..23: mol_type = other DNA
  modified_base 1: mod_base = OTHER; note = 2'-O-methyladenosine-3'-phosphorothioate
  modified_base 2: mod_base = OTHER; note = 2'-deoxyadenosine-3'-phosphorothioate
  modified_base 3: mod_base = OTHER; note = 2'-O-methylguanosine-3'-phosphate
  modified_base 4: mod_base = OTHER; note = 2'-O-methylcytidine-3'-phosphate
  modified_base 6: mod_base = OTHER; note = 2'-O-methyladenosine-3'-phosphate
  modified_base 8: mod_base = OTHER; note = 2'-O-methylcytidine-3'-phosphate
  modified_base 9: mod_base = OTHER; note = 2'-O-methyluridine-3'-phosphate
  modified_base 10: mod_base = OTHER; note = 2'-O-methylcytidine-3'-phosphate
  modified_base 11: mod_base = OTHER; note = 2'-O-methylguanosine-3'-phosphate
  modified_base 13: mod_base = OTHER; note = 2'-O-methylguanosine-3'-phosphate
  modified_base 15: mod_base = OTHER; note = 2'-O-methyladenosine-3'-phosphate
  modified_base 16: mod_base = OTHER; note = 2'-O-methyluridine-3'-phosphate
  modified_base 17: mod_base = OTHER; note = 2'-O-methylguanosine-3'-phosphate
  modified_base 18: mod_base = OTHER; note = 2'-O-methylcytidine-3'-phosphate
  modified_base 19: mod_base = OTHER; note = 2'-O-methyladenosine-3'-phosphate
  modified_base 20: mod_base = OTHER; note = 2'-O-methyladenosine-3'-phosphate
  modified_base 21: mod_base = OTHER; note = 2'-O-methyladenosine-3'-phosphorothioate
  modified_base 22: mod_base = OTHER; note = 2'-O-methylguanosine-3'-phosphorothioate
  modified_base 23: mod_base = OTHER; note = 2'-O-methyladenosine
  misc_feature 1: note = RNA
  misc_feature 3..4: note = RNA
  misc_feature 6: note = RNA
  misc_feature 8..11: note = RNA
  misc_feature 13: note = RNA
  misc_feature 15..23: note = RNA
  misc_feature 2: note = DNA
  misc_feature 5: note = DNA
  misc_feature 7: note = DNA
  misc_feature 12: note = DNA
  misc_feature 14: note = DNA
aagcgatctcgagaatgcaaaga

SEQ ID NO: 593 - DNA, 23 bp, synthetic construct
  source 1..23: mol_type = other DNA
  modified_base 1: mod_base = OTHER; note = 2'-O-methyladenosine-3'-phosphorothioate
  modified_base 2: mod_base = OTHER; note = 2'-deoxyguanosine-3'-phosphorothioate
  modified_base 3: mod_base = OTHER; note = 2'-O-methylguanosine-3'-phosphate
  modified_base 4: mod_base = OTHER; note = 2'-O-methylguanosine-3'-phosphate
  modified_base 6: mod_base = OTHER; note = 2'-O-methyladenosine-3'-phosphate
  modified_base 8: mod_base = OTHER; note = 2'-O-methylguanosine-3'-phosphate
  modified_base 9: mod_base = OTHER; note = 2'-O-methylcytidine-3'-phosphate
  modified_base 10: mod_base = OTHER; note = 2'-O-methyladenosine-3'-phosphate
  modified_base 11: mod_base = OTHER; note = 2'-O-methyluridine-3'-phosphate
  modified_base 13: mod_base = OTHER; note = 2'-O-methylcytidine-3'-phosphate
  modified_base 15: mod_base = OTHER; note = 2'-O-methyladenosine-3'-phosphate
  modified_base 16: mod_base = OTHER; note = 2'-O-methylguanosine-3'-phosphate
  modified_base 17: mod_base = OTHER; note = 2'-O-methyluridine-3'-phosphate
  modified_base 18: mod_base = OTHER; note = 2'-O-methylguanosine-3'-phosphate
  modified_base 19: mod_base = OTHER; note = 2'-O-methylguanosine-3'-phosphate
  modified_base 20: mod_base = OTHER; note = 2'-O-methyladenosine-3'-phosphate
  modified_base 21: mod_base = OTHER; note = 2'-O-methylguanosine-3'-phosphorothioate
  modified_base 22: mod_base = OTHER; note = 2'-O-methylcytidine-3'-phosphorothioate
  modified_base 23: mod_base = OTHER; note = 2'-O-methyladenosine
  misc_feature 1: note = RNA
  misc_feature 3..4: note = RNA
  misc_feature 6: note = RNA
  misc_feature 8..11: note = RNA
  misc_feature 13: note = RNA
  misc_feature 15..23: note = RNA
  misc_feature 2: note = DNA
  misc_feature 5: note = DNA
  misc_feature 7: note = DNA
  misc_feature 12: note = DNA
  misc_feature 14: note = DNA
agggaaagcatccgagtggagca

SEQ ID NO: 594 - DNA, 23 bp, synthetic construct
  source 1..23: mol_type = other DNA
  modified_base 1: mod_base = OTHER; note = 2'-O-methyladenosine-3'-phosphorothioate
  modified_base 2: mod_base = OTHER; note = 2'-deoxycytidine-3'-phosphorothioate
  modified_base 3: mod_base = OTHER; note = 2'-O-methyluridine-3'-phosphate
  modified_base 4: mod_base = OTHER; note = 2'-O-methylcytidine-3'-phosphate
  modified_base 6: mod_base = OTHER; note = 2'-O-methylcytidine-3'-phosphate
  modified_base 8: mod_base = OTHER; note = 2'-O-methylcytidine-3'-phosphate
  modified_base 9: mod_base = OTHER; note = 2'-O-methylguanosine-3'-phosphate
  modified_base 10: mod_base = OTHER; note = 2'-O-methyladenosine-3'-phosphate
  modified_base 11: mod_base = OTHER; note = 2'-O-methylcytidine-3'-phosphate
  modified_base 13: mod_base = OTHER; note = 2'-O-methyladenosine-3'-phosphate
  modified_base 15: mod_base = OTHER; note = 2'-O-methyladenosine-3'-phosphate
  modified_base 16: mod_base = OTHER; note = 2'-O-methylcytidine-3'-phosphate
  modified_base 17: mod_base = OTHER; note = 2'-O-methyladenosine-3'-phosphate
  modified_base 18: mod_base = OTHER; note = 2'-O-methyladenosine-3'-phosphate
  modified_base 19: mod_base = OTHER; note = 2'-O-methylguanosine-3'-phosphate
  modified_base 20: mod_base = OTHER; note = 2'-O-methylcytidine-3'-phosphate
  modified_base 21: mod_base = OTHER; note = 2'-O-methylcytidine-3'-phosphorothioate
  modified_base 22: mod_base = OTHER; note = 2'-O-methylcytidine-3'-phosphorothioate
  modified_base 23: mod_base = OTHER; note = 2'-O-methylcytidine
  misc_feature 1: note = RNA
  misc_feature 3..4: note = RNA
  misc_feature 6: note = RNA
  misc_feature 8..11: note = RNA
  misc_feature 13: note = RNA
  misc_feature 15..23: note = RNA
  misc_feature 2: note = DNA
  misc_feature 5: note = DNA
  misc_feature 7: note = DNA
  misc_feature 12: note = DNA
  misc_feature 14: note = DNA
actcacacgaccatacaagcccc

SEQ ID NO: 595 - DNA, 23 bp, synthetic construct
  source 1..23: mol_type = other DNA
  modified_base 1: mod_base = OTHER; note = 2'-O-methyladenosine-3'-phosphorothioate
  modified_base 2: mod_base = OTHER; note = 2'-deoxyadenosine-3'-phosphorothioate
  modified_base 3: mod_base = OTHER; note = 2'-O-methyladenosine-3'-phosphate
  modified_base 4: mod_base = OTHER; note = 2'-O-methylcytidine-3'-phosphate
  modified_base 6: mod_base = OTHER; note = 2'-O-methylcytidine-3'-phosphate
  modified_base 8: mod_base = OTHER; note = 2'-O-methyladenosine-3'-phosphate
  modified_base 9: mod_base = OTHER; note = 2'-O-methylcytidine-3'-phosphate
  modified_base 10: mod_base = OTHER; note = 2'-O-methylguanosine-3'-phosphate
  modified_base 11: mod_base = OTHER; note = 2'-O-methyluridine-3'-phosphate
  modified_base 13: mod_base = OTHER; note = 2'-O-methyluridine-3'-phosphate
  modified_base 15: mod_base = OTHER; note = 2'-O-methylcytidine-3'-phosphate
  modified_base 16: mod_base = OTHER; note = 2'-O-methylguanosine-3'-phosphate
  modified_base 17: mod_base = OTHER; note = 2'-O-methyluridine-3'-phosphate
  modified_base 18: mod_base = OTHER; note = 2'-O-methyladenosine-3'-phosphate
  modified_base 19: mod_base = OTHER; note = 2'-O-methylguanosine-3'-phosphate
  modified_base 20: mod_base = OTHER; note = 2'-O-methylcytidine-3'-phosphate
  modified_base 21: mod_base = OTHER; note = 2'-O-methylcytidine-3'-phosphorothioate
  modified_base 22: mod_base = OTHER; note = 2'-O-methyladenosine-3'-phosphorothioate
  modified_base 23: mod_base = OTHER; note = 2'-O-methyladenosine
  misc_feature 1: note = RNA
  misc_feature 3..4: note = RNA
  misc_feature 6: note = RNA
  misc_feature 8..11: note = RNA
  misc_feature 13: note = RNA
  misc_feature 15..23: note = RNA
  misc_feature 2: note = DNA
  misc_feature 5: note = DNA
  misc_feature 7: note = DNA
  misc_feature 12: note = DNA
  misc_feature 14: note = DNA
aaacaccacgtctccgtagccaa

SEQ ID NO: 596 - DNA, 23 bp, synthetic construct
  source 1..23: mol_type = other DNA
  modified_base 1: mod_base = OTHER; note = 2'-O-methyladenosine-3'-phosphorothioate
  modified_base 2: mod_base = OTHER; note = 2'-deoxyguanosine-3'-phosphorothioate
  modified_base 3: mod_base = OTHER; note = 2'-O-methylguanosine-3'-phosphate
  modified_base 4: mod_base = OTHER; note = 2'-O-methyluridine-3'-phosphate
  modified_base 6: mod_base = OTHER; note = 2'-O-methyladenosine-3'-phosphate
  modified_base 8: mod_base = OTHER; note = 2'-O-methyladenosine-3'-phosphate
  modified_base 9: mod_base = OTHER; note = 2'-O-methyluridine-3'-phosphate
  modified_base 10: mod_base = OTHER; note = 2'-O-methylcytidine-3'-phosphate
  modified_base 11: mod_base = OTHER; note = 2'-O-methyladenosine-3'-phosphate
  modified_base 13: mod_base = OTHER; note = 2'-O-methylcytidine-3'-phosphate
  modified_base 15: mod_base = OTHER; note = 2'-O-methyluridine-3'-phosphate
  modified_base 16: mod_base = OTHER; note = 2'-O-methyluridine-3'-phosphate
  modified_base 17: mod_base = OTHER; note = 2'-O-methylcytidine-3'-phosphate
  modified_base 18: mod_base = OTHER; note = 2'-O-methyluridine-3'-phosphate
  modified_base 19: mod_base = OTHER; note = 2'-O-methylcytidine-3'-phosphate
  modified_base 20: mod_base = OTHER; note = 2'-O-methyladenosine-3'-phosphate
  modified_base 21: mod_base = OTHER; note = 2'-O-methyladenosine-3'-phosphorothioate
  modified_base 22: mod_base = OTHER; note = 2'-O-methyladenosine-3'-phosphorothioate
  modified_base 23: mod_base = OTHER; note = 2'-O-methylguanosine
  misc_feature 1: note = RNA
  misc_feature 3..4: note = RNA
  misc_feature 6: note = RNA
  misc_feature 8..11: note = RNA
  misc_feature 13: note = RNA
  misc_feature 15..23: note = RNA
  misc_feature 2: note = DNA
  misc_feature 5: note = DNA
  misc_feature 7: note = DNA
  misc_feature 12: note = DNA
  misc_feature 14: note = DNA
aggtcagatcaaccttctcaaag

SEQ ID NO: 597 - DNA, 23 bp, synthetic construct
  source 1..23: mol_type = other DNA
  modified_base 1: mod_base = OTHER; note = 2'-O-methyladenosine-3'-phosphorothioate
  modified_base 2: mod_base = OTHER; note = 2'-deoxycytidine-3'-phosphorothioate
  modified_base 3: mod_base = OTHER; note = 2'-O-methyluridine-3'-phosphate
  modified_base 4: mod_base = OTHER; note = 2'-O-methyluridine-3'-phosphate
  modified_base 6: mod_base = OTHER; note = 2'-O-methyladenosine-3'-phosphate
  modified_base 8: mod_base = OTHER; note = 2'-O-methyluridine-3'-phosphate
  modified_base 9: mod_base = OTHER; note = 2'-O-methylcytidine-3'-phosphate
  modified_base 10: mod_base = OTHER; note = 2'-O-methylcytidine-3'-phosphate
  modified_base 11: mod_base = OTHER; note = 2'-O-methyladenosine-3'-phosphate
  modified_base 13: mod_base = OTHER; note = 2'-O-methylguanosine-3'-phosphate
  modified_base 15: mod_base = OTHER; note = 2'-O-methyluridine-3'-phosphate
  modified_base 16: mod_base = OTHER; note = 2'-O-methylguanosine-3'-phosphate
  modified_base 17: mod_base = OTHER; note = 2'-O-methylguanosine-3'-phosphate
  modified_base 18: mod_base = OTHER; note = 2'-O-methylguanosine-3'-phosphate
  modified_base 19: mod_base = OTHER; note = 2'-O-methylcytidine-3'-phosphate
  modified_base 20: mod_base = OTHER; note = 2'-O-methyluridine-3'-phosphate
  modified_base 21: mod_base = OTHER; note = 2'-O-methylcytidine-3'-phosphorothioate
  modified_base 22: mod_base = OTHER; note = 2'-O-methylcytidine-3'-phosphorothioate
  modified_base 23: mod_base = OTHER; note = 2'-O-methyladenosine
  misc_feature 1: note = RNA
  misc_feature 3..4: note = RNA
  misc_feature 6: note = RNA
  misc_feature 8..11: note = RNA
  misc_feature 13: note = RNA
  misc_feature 15..23: note = RNA
  misc_feature 2: note = DNA
  misc_feature 5: note = DNA
  misc_feature 7: note = DNA
  misc_feature 12: note = DNA
  misc_feature 14: note = DNA
acttaattccaaggtgggctcca

SEQ ID NO: 598 - DNA, 23 bp, synthetic construct
  source 1..23: mol_type = other DNA
  modified_base 1: mod_base = OTHER; note = 2'-O-methyladenosine-3'-phosphorothioate
  modified_base 2: mod_base = OTHER; note = 2'-deoxythymidine-3'-phosphorothioate
  modified_base 3: mod_base = OTHER; note = 2'-O-methylcytidine-3'-phosphate
  modified_base 4: mod_base = OTHER; note = 2'-O-methyladenosine-3'-phosphate
  modified_base 6: mod_base = OTHER; note = 2'-O-methylcytidine-3'-phosphate
  modified_base 8: mod_base = OTHER; note = 2'-O-methylcytidine-3'-phosphate
  modified_base 9: mod_base = OTHER; note = 2'-O-methyladenosine-3'-phosphate
  modified_base 10: mod_base = OTHER; note = 2'-O-methylguanosine-3'-phosphate
  modified_base 11: mod_base = OTHER; note = 2'-O-methylguanosine-3'-phosphate
  modified_base 13: mod_base = OTHER; note = 2'-O-methyladenosine-3'-phosphate
  modified_base 15: mod_base = OTHER; note = 2'-O-methyladenosine-3'-phosphate
  modified_base 16: mod_base = OTHER; note = 2'-O-methylguanosine-3'-phosphate
  modified_base 17: mod_base = OTHER; note = 2'-O-methyladenosine-3'-phosphate
  modified_base 18: mod_base = OTHER; note = 2'-O-methylcytidine-3'-phosphate
  modified_base 19: mod_base = OTHER; note = 2'-O-methyladenosine-3'-phosphate
  modified_base 20: mod_base = OTHER; note = 2'-O-methyladenosine-3'-phosphate
  modified_base 21: mod_base = OTHER; note = 2'-O-methylguanosine-3'-phosphorothioate
  modified_base 22: mod_base = OTHER; note = 2'-O-methylcytidine-3'-phosphorothioate
  modified_base 23: mod_base = OTHER; note = 2'-O-methyladenosine
  misc_feature 1: note = RNA
  misc_feature 3..4: note = RNA
  misc_feature 6: note = RNA
  misc_feature 8..11: note = RNA
  misc_feature 13: note = RNA
  misc_feature 15..23: note = RNA
  misc_feature 2: note = DNA
  misc_feature 5: note = DNA
  misc_feature 7: note = DNA
  misc_feature 12: note = DNA
  misc_feature 14: note = DNA
atcagcccaggcacagacaagca

SEQ ID NO: 599 - DNA, 23 bp, synthetic construct
  source 1..23: mol_type = other DNA
  modified_base 1: mod_base = OTHER; note = 2'-O-methyladenosine-3'-phosphorothioate
  modified_base 2: mod_base = OTHER; note = 2'-deoxycytidine-3'-phosphorothioate
  modified_base 3: mod_base = OTHER; note = 2'-O-methylguanosine-3'-phosphate
  modified_base 4: mod_base = OTHER; note = 2'-O-methyladenosine-3'-phosphate
  modified_base 6: mod_base = OTHER; note = 2'-O-methylcytidine-3'-phosphate
  modified_base 8: mod_base = OTHER; note = 2'-O-methylcytidine-3'-phosphate
  modified_base 9: mod_base = OTHER; note = 2'-O-methylguanosine-3'-phosphate
  modified_base 10: mod_base = OTHER; note = 2'-O-methyladenosine-3'-phosphate
  modified_base 11: mod_base = OTHER; note = 2'-O-methylguanosine-3'-phosphate
  modified_base 13: mod_base = OTHER; note = 2'-O-methyladenosine-3'-phosphate
  modified_base 15: mod_base = OTHER; note = 2'-O-methylguanosine-3'-phosphate
  modified_base 16: mod_base = OTHER; note = 2'-O-methylcytidine-3'-phosphate
  modified_base 17: mod_base = OTHER; note = 2'-O-methyladenosine-3'-phosphate
  modified_base 18: mod_base = OTHER; note = 2'-O-methyladenosine-3'-phosphate
  modified_base 19: mod_base = OTHER; note = 2'-O-methyladenosine-3'-phosphate
  modified_base 20: mod_base = OTHER; note = 2'-O-methylguanosine-3'-phosphate
  modified_base 21: mod_base = OTHER; note = 2'-O-methyladenosine-3'-phosphorothioate
  modified_base 22: mod_base = OTHER; note = 2'-O-methylguanosine-3'-phosphorothioate
  modified_base 23: mod_base = OTHER; note = 2'-O-methyladenosine
  misc_feature 1: note = RNA
  misc_feature 3..4: note = RNA
  misc_feature 6: note = RNA
  misc_feature 8..11: note = RNA
  misc_feature 13: note = RNA
  misc_feature 15..23: note = RNA
  misc_feature 2: note = DNA
  misc_feature 5: note = DNA
  misc_feature 7: note = DNA
  misc_feature 12: note = DNA
  misc_feature 14: note = DNA
acgatctcgagaatgcaaagaga

SEQ ID NO: 600 - DNA, 23 bp, synthetic construct
  source 1..23: mol_type = other DNA
  modified_base 1: mod_base = OTHER; note = 2'-O-methyladenosine-3'-phosphorothioate
  modified_base 2: mod_base = OTHER; note = 2'-deoxycytidine-3'-phosphorothioate
  modified_base 3: mod_base = OTHER; note = 2'-O-methylguanosine-3'-phosphate
  modified_base 4: mod_base = OTHER; note = 2'-O-methyladenosine-3'-phosphate
  modified_base 6: mod_base = OTHER; note = 2'-O-methyluridine-3'-phosphate
  modified_base 8: mod_base = OTHER; note = 2'-O-methyluridine-3'-phosphate
  modified_base 9: mod_base = OTHER; note = 2'-O-methylcytidine-3'-phosphate
  modified_base 10: mod_base = OTHER; note = 2'-O-methyladenosine-3'-phosphate
  modified_base 11: mod_base = OTHER; note = 2'-O-methylguanosine-3'-phosphate
  modified_base 13: mod_base = OTHER; note = 2'-O-methylguanosine-3'-phosphate
  modified_base 15: mod_base = OTHER; note = 2'-O-methyluridine-3'-phosphate
  modified_base 16: mod_base = OTHER; note = 2'-O-methyluridine-3'-phosphate
  modified_base 17: mod_base = OTHER; note = 2'-O-methylcytidine-3'-phosphate
  modified_base 18: mod_base = OTHER; note = 2'-O-methylcytidine-3'-phosphate
  modified_base 19: mod_base = OTHER; note = 2'-O-methyluridine-3'-phosphate
  modified_base 20: mod_base = OTHER; note = 2'-O-methylguanosine-3'-phosphate
  modified_base 21: mod_base = OTHER; note = 2'-O-methylcytidine-3'-phosphorothioate
  modified_base 22: mod_base = OTHER; note = 2'-O-methyladenosine-3'-phosphorothioate
  modified_base 23: mod_base = OTHER; note = 2'-O-methylcytidine
  misc_feature 1: note = RNA
  misc_feature 3..4: note = RNA
  misc_feature 6: note = RNA
  misc_feature 8..11: note = RNA
  misc_feature 13: note = RNA
  misc_feature 15..23: note = RNA
  misc_feature 2: note = DNA
  misc_feature 5: note = DNA
  misc_feature 7: note = DNA
  misc_feature 12: note = DNA
  misc_feature 14: note = DNA
acgaatctcagtgcttcctgcac

SEQ ID NO: 601 - DNA, 23 bp, synthetic construct
  source 1..23: mol_type = other DNA
  modified_base 1: mod_base = OTHER; note = 2'-O-methyladenosine-3'-phosphorothioate
  modified_base 2: mod_base = OTHER; note = 2'-deoxycytidine-3'-phosphorothioate
  modified_base 3: mod_base = OTHER; note = 2'-O-methylguanosine-3'-phosphate
  modified_base 4: mod_base = OTHER; note = 2'-O-methylcytidine-3'-phosphate
  modified_base 6: mod_base = OTHER; note = 2'-O-methylguanosine-3'-phosphate
  modified_base 8: mod_base = OTHER; note = 2'-O-methyluridine-3'-phosphate
  modified_base 9: mod_base = OTHER; note = 2'-O-methyladenosine-3'-phosphate
  modified_base 10: mod_base = OTHER; note = 2'-O-methyladenosine-3'-phosphate
  modified_base 11: mod_base = OTHER; note = 2'-O-methylguanosine-3'-phosphate
  modified_base 13: mod_base = OTHER; note = 2'-O-methylguanosine-3'-phosphate
  modified_base 15: mod_base = OTHER; note = 2'-O-methyluridine-3'-phosphate
  modified_base 16: mod_base = OTHER; note = 2'-O-methylcytidine-3'-phosphate
  modified_base 17: mod_base = OTHER; note = 2'-O-methyluridine-3'-phosphate
  modified_base 18: mod_base = OTHER; note = 2'-O-methylcytidine-3'-phosphate
  modified_base 19: mod_base = OTHER; note = 2'-O-methylguanosine-3'-phosphate
  modified_base 20: mod_base = OTHER; note = 2'-O-methyladenosine-3'-phosphate
  modified_base 21: mod_base = OTHER; note = 2'-O-methylguanosine-3'-phosphorothioate
  modified_base 22: mod_base = OTHER; note = 2'-O-methyladenosine-3'-phosphorothioate
  modified_base 23: mod_base = OTHER; note = 2'-O-methyladenosine
  misc_feature 1: note = RNA
  misc_feature 3..4: note = RNA
  misc_feature 6: note = RNA
  misc_feature 8..11: note = RNA
  misc_feature 13: note = RNA
  misc_feature 15..23: note = RNA
  misc_feature 2: note = DNA
  misc_feature 5: note = DNA
  misc_feature 7: note = DNA
  misc_feature 12: note = DNA
  misc_feature 14: note = DNA
acgcggctaagcgatctcgagaa

SEQ ID NO: 602 - DNA, 23 bp, synthetic construct
  source 1..23: mol_type = other DNA
  modified_base 1: mod_base = OTHER; note = 2'-O-methyladenosine-3'-phosphorothioate
  modified_base 2: mod_base = OTHER; note = 2'-deoxyguanosine-3'-phosphorothioate
  modified_base 3: mod_base = OTHER; note = 2'-O-methyladenosine-3'-phosphate
  modified_base 4: mod_base = OTHER; note = 2'-O-methylguanosine-3'-phosphate
  modified_base 6: mod_base = OTHER; note = 2'-O-methylcytidine-3'-phosphate
  modified_base 8: mod_base = OTHER; note = 2'-O-methyluridine-3'-phosphate
  modified_base 9: mod_base = OTHER; note = 2'-O-methyluridine-3'-phosphate
  modified_base 10: mod_base = OTHER; note = 2'-O-methylguanosine-3'-phosphate
  modified_base 11: mod_base = OTHER; note = 2'-O-methyladenosine-3'-phosphate
  modified_base 13: mod_base = OTHER; note = 2'-O-methylguanosine-3'-phosphate
  modified_base 15: mod_base = OTHER; note = 2'-O-methyluridine-3'-phosphate
  modified_base 16: mod_base = OTHER; note = 2'-O-methylguanosine-3'-phosphate
  modified_base 17: mod_base = OTHER; note = 2'-O-methyluridine-3'-phosphate
  modified_base 18: mod_base = OTHER; note = 2'-O-methylcytidine-3'-phosphate
  modified_base 19: mod_base = OTHER; note = 2'-O-methyluridine-3'-phosphate
  modified_base 20: mod_base = OTHER; note = 2'-O-methylcytidine-3'-phosphate
  modified_base 21: mod_base = OTHER; note = 2'-O-methylcytidine-3'-phosphorothioate
  modified_base 22: mod_base = OTHER; note = 2'-O-methyladenosine-3'-phosphorothioate
  modified_base 23: mod_base = OTHER; note = 2'-O-methylguanosine
  misc_feature 1: note = RNA
  misc_feature 3..4: note = RNA
  misc_feature 6: note = RNA
  misc_feature 8..11: note = RNA
  misc_feature 13: note = RNA
  misc_feature 15..23: note = RNA
  misc_feature 2: note = DNA
  misc_feature 5: note = DNA
  misc_feature 7: note = DNA
  misc_feature 12: note = DNA
  misc_feature 14: note = DNA
agaggcattgaaggtgtctccag

SEQ ID NO: 603 - DNA, 23 bp, synthetic construct
  source 1..23: mol_type = other DNA
  modified_base 1: mod_base = OTHER; note = 2'-O-methyladenosine-3'-phosphorothioate
  modified_base 2: mod_base = OTHER; note = 2'-deoxyguanosine-3'-phosphorothioate
  modified_base 3: mod_base = OTHER; note = 2'-O-methylcytidine-3'-phosphate
  modified_base 4: mod_base = OTHER; note = 2'-O-methylguanosine-3'-phosphate
  modified_base 6: mod_base = OTHER; note = 2'-O-methyluridine-3'-phosphate
  modified_base 8: mod_base = OTHER; note = 2'-O-methyluridine-3'-phosphate
  modified_base 9: mod_base = OTHER; note = 2'-O-methylcytidine-3'-phosphate
  modified_base 10: mod_base = OTHER; note = 2'-O-methylguanosine-3'-phosphate
  modified_base 11: mod_base = OTHER; note = 2'-O-methyladenosine-3'-phosphate
  modified_base 13: mod_base = OTHER; note = 2'-O-methyladenosine-3'-phosphate
  modified_base 15: mod_base = OTHER; note = 2'-O-methyluridine-3'-phosphate
  modified_base 16: mod_base = OTHER; note = 2'-O-methylguanosine-3'-phosphate
  modified_base 17: mod_base = OTHER; note = 2'-O-methylcytidine-3'-phosphate
  modified_base 18: mod_base = OTHER; note = 2'-O-methyladenosine-3'-phosphate
  modified_base 19: mod_base = OTHER; note = 2'-O-methyladenosine-3'-phosphate
  modified_base 20: mod_base = OTHER; note = 2'-O-methyladenosine-3'-phosphate
  modified_base 21: mod_base = OTHER; note = 2'-O-methylguanosine-3'-phosphorothioate
  modified_base 22: mod_base = OTHER; note = 2'-O-methyladenosine-3'-phosphorothioate
  modified_base 23: mod_base = OTHER; note = 2'-O-methylguanosine
  misc_feature 1: note = RNA
  misc_feature 3..4: note = RNA
  misc_feature 6: note = RNA
  misc_feature 8..11: note = RNA
  misc_feature 13: note = RNA
  misc_feature 15..23: note = RNA
  misc_feature 2: note = DNA
  misc_feature 5: note = DNA
  misc_feature 7: note = DNA
  misc_feature 12: note = DNA
  misc_feature 14: note = DNA
agcgatctcgagaatgcaaagag

SEQ ID NO: 604 - DNA, 23 bp, synthetic construct
  source 1..23: mol_type = other DNA
  modified_base 1: mod_base = OTHER; note = 2'-O-methyladenosine-3'-phosphorothioate
  modified_base 2: mod_base = OTHER; note = 2'-deoxycytidine-3'-phosphorothioate
  modified_base 3: mod_base = OTHER; note = 2'-O-methylguanosine-3'-phosphate
  modified_base 4: mod_base = OTHER; note = 2'-O-methylguanosine-3'-phosphate
  modified_base 6: mod_base = OTHER; note = 2'-O-methylcytidine-3'-phosphate
  modified_base 8: mod_base = OTHER; note = 2'-O-methyluridine-3'-phosphate
  modified_base 9: mod_base = OTHER; note = 2'-O-methylcytidine-3'-phosphate
  modified_base 10: mod_base = OTHER; note = 2'-O-methyladenosine-3'-phosphate
  modified_base 11: mod_base = OTHER; note = 2'-O-methyladenosine-3'-phosphate
  modified_base 13: mod_base = OTHER; note = 2'-O-methylguanosine-3'-phosphate
  modified_base 15: mod_base = OTHER; note = 2'-O-methylguanosine-3'-phosphate
  modified_base 16: mod_base = OTHER; note = 2'-O-methylguanosine-3'-phosphate
  modified_base 17: mod_base = OTHER; note = 2'-O-methyladenosine-3'-phosphate
  modified_base 18: mod_base = OTHER; note = 2'-O-methyluridine-3'-phosphate
  modified_base 19: mod_base = OTHER; note = 2'-O-methylcytidine-3'-phosphate
  modified_base 20: mod_base = OTHER; note = 2'-O-methylcytidine-3'-phosphate
  modified_base 21: mod_base = OTHER; note = 2'-O-methyladenosine-3'-phosphorothioate
  modified_base 22: mod_base = OTHER; note = 2'-O-methylcytidine-3'-phosphorothioate
  modified_base 23: mod_base = OTHER; note = 2'-O-methyluridine
  misc_feature 1: note = RNA
  misc_feature 3..4: note = RNA
  misc_feature 6: note = RNA
  misc_feature 8..11: note = RNA
  misc_feature 13: note = RNA
  misc_feature 15..23: note = RNA
  misc_feature 2: note = DNA
  misc_feature 5: note = DNA
  misc_feature 7: note = DNA
  misc_feature 12: note = DNA
  misc_feature 14: note = DNA
acggccctcaatgtggatccact

SEQ ID NO: 605 - DNA, 23 bp, synthetic construct
  source 1..23: mol_type = other DNA
  modified_base 1: mod_base = OTHER; note = 2'-O-methyluridine-3'-phosphorothioate
  modified_base 2: mod_base = OTHER; note = 2'-deoxyguanosine-3'-phosphorothioate
  modified_base 3: mod_base = OTHER; note = 2'-O-methyluridine-3'-phosphate
  modified_base 4: mod_base = OTHER; note = 2'-O-methyladenosine-3'-phosphate
  modified_base 6: mod_base = OTHER; note = 2'-O-methylcytidine-3'-phosphate
  modified_base 8: mod_base = OTHER; note = 2'-O-methylguanosine-3'-phosphate
  modified_base 9: mod_base = OTHER; note = 2'-O-methyladenosine-3'-phosphate
  modified_base 10: mod_base = OTHER; note = 2'-O-methylcytidine-3'-phosphate
  modified_base 11: mod_base = OTHER; note = 2'-O-methyladenosine-3'-phosphate
  modified_base 13: mod_base = OTHER; note = 2'-O-methyladenosine-3'-phosphate
  modified_base 15: mod_base = OTHER; note = 2'-O-methylcytidine-3'-phosphate
  modified_base 16: mod_base = OTHER; note = 2'-O-methyluridine-3'-phosphate
  modified_base 17: mod_base = OTHER; note = 2'-O-methylguanosine-3'-phosphate
  modified_base 18: mod_base = OTHER; note = 2'-O-methylguanosine-3'-phosphate
  modified_base 19: mod_base = OTHER; note = 2'-O-methylcytidine-3'-phosphate
  modified_base 20: mod_base = OTHER; note = 2'-O-methyladenosine-3'-phosphate
  modified_base 21: mod_base = OTHER; note = 2'-O-methylguanosine-3'-phosphorothioate
  modified_base 22: mod_base = OTHER; note = 2'-O-methylguanosine-3'-phosphorothioate
  modified_base 23: mod_base = OTHER; note = 2'-O-methylcytidine
  misc_feature 1: note = RNA
  misc_feature 3..4: note = RNA
  misc_feature 6: note = RNA
  misc_feature 8..11: note = RNA
  misc_feature 13: note = RNA
  misc_feature 15..23: note = RNA
  misc_feature 2: note = DNA
  misc_feature 5: note = DNA
  misc_feature 7: note = DNA
  misc_feature 12: note = DNA
  misc_feature 14: note = DNA
tgtagcagacacatctggcaggc

SEQ ID NO: 606 - RNA, 23 nt, synthetic construct
  source 1..23: mol_type = other RNA
gacccagttcaagtggatccaca

1. A double stranded ribonucleic acid (dsRNA) for inhibiting expression of ketohexokinase (KHK) in a cell,
(a) wherein said dsRNA comprises a sense strand and an antisense strand forming a double stranded region, wherein the antisense strand comprises a region of complementarity to an mRNA encoding KHK, and wherein the region of complementarity comprises at least 15 contiguous nucleotides differing by no more than 3 nucleotides from any one of the antisense nucleotide sequences in any one of Tables 2-5; or
(b) wherein said dsRNA comprises a sense strand and an antisense strand forming a double stranded region, wherein the sense strand comprises at least 15 contiguous nucleotides differing by no more than three nucleotides from any one of the nucleotide sequence of nucleotides 943-965; 788-810; 734-756; 1016-1038; 1013-1035; 1207-1229; 1149-1171; 574-596; 1207-1229 or 828-850 of SEQ ID NO: 1, and the antisense strand comprises at least 15 contiguous nucleotides from the corresponding nucleotide sequence of SEQ ID NO:2.

2.-5. (canceled)

6. The dsRNA agent of claim 1, wherein all of the nucleotides of the sense strand comprise a modification; all of the nucleotides of the antisense strand comprise a modification; or all of the nucleotides of the sense strand and all of the nucleotides of the antisense strand comprise a modification.

7. The dsRNA agent of claim 6, wherein at least one of the modified nucleotides is selected from the group consisting of a deoxy-nucleotide, a 3′-terminal deoxythymidine (dT) nucleotide, a 2′-O-methyl modified nucleotide, a 2′-fluoro modified nucleotide, a 2′-deoxy-modified nucleotide, a locked nucleotide, an unlocked nucleotide, a conformationally restricted nucleotide, a constrained ethyl nucleotide, an abasic nucleotide, a 2′-amino-modified nucleotide, a 2′-O-allyl-modified nucleotide, 2′-C-alkyl-modified nucleotide, 2′-hydroxly-modified nucleotide, a 2′-methoxyethyl modified nucleotide, a 2′-O-alkyl-modified nucleotide, a morpholino nucleotide, a phosphoramidate, a non-natural base comprising nucleotide, a tetrahydropyran modified nucleotide, a 1,5-anhydrohexitol modified nucleotide, a cyclohexenyl modified nucleotide, a nucleotide comprising a phosphorothioate group, a nucleotide comprising a methylphosphonate group, a nucleotide comprising a 5′-phosphate, a nucleotide comprising a 5′-phosphate mimic, a thermally destabilizing nucleotide, a glycol modified nucleotide (GNA), and a 2-O—(N-methylacetamide) modified nucleotide; and combinations thereof.

8.-11. (canceled)

12. The dsRNA agent of claim 1, wherein the double stranded region is 19-30 nucleotide pairs in length.

13.-16. (canceled)

17. The dsRNA agent of claim 1, wherein each strand is independently no more than 30 nucleotides in length.

18.-21. (canceled)

22. The dsRNA agent of claim 1, wherein at least one strand comprises a 3′ overhang of at least 1 nucleotide or wherein at least one strand comprises a 3′ overhang of at least 2 nucleotides.

23. (canceled)

24. The dsRNA agent of claim 1, further comprising a ligand.

25. The dsRNA agent of claim 24, wherein the ligand is conjugated to the 3′ end of the sense strand of the dsRNA agent.

26. The dsRNA agent of claim 24, wherein the ligand is an N-acetylgalactosamine (GalNAc) derivative.

27. The dsRNA agent of claim 24, wherein the ligand is one or more GalNAc derivatives attached through a monovalent, bivalent, or trivalent branched linker.

28. The dsRNA agent of claim 26, wherein the ligand is

[chemical structure]

29. The dsRNA agent of claim 28, wherein the dsRNA agent is conjugated to the ligand as shown in the following schematic [chemical structure]
and, wherein X is O or S.

30. The dsRNA agent of claim 29, wherein the X is O.

31. The dsRNA agent of claim 1, wherein the dsRNA agent further comprises at least one phosphorothioate or methylphosphonate internucleotide linkage.

32.-40. (canceled)

41. An isolated cell containing the dsRNA agent of claim 1.

42. A pharmaceutical composition for inhibiting expression of a gene encoding ketohexokinase (KHK) comprising the dsRNA agent of claim 1.

43.-47. (canceled)

48. A method of inhibiting expression of a ketohexokinase (KHK) gene in a cell, the method comprising contacting the cell with the dsRNA agent of claim 1, thereby inhibiting expression of the KHK gene in the cell.

49.-53. (canceled)

54. A method of treating a subject having a disorder that would benefit from reduction in ketohexokinase expression, comprising administering to the subject a therapeutically effective amount of the dsRNA agent of claim 1, thereby treating the subject having the disorder that would benefit from reduction in ketohexokinase expression.

55. (canceled)

56. The method of claim 54, wherein the disorder is a ketohexokinase-associated disorder.

57. The method of claim 56, wherein the KHK-associated disease is selected from the group consisting of liver disease, dyslipidemia or abnormal lipid deposition or dysfunction, a disorder of glycemic control, kidney disease, and cardiovascular disease.

58.-66. (canceled)

67. The method of claim 54, wherein the subject is human.

68. (canceled)

69. The method of claim 54, wherein the dsRNA agent is administered to the subject at a dose of about 0.01 mg/kg to about 50 mg/kg.

70. The method of claim 54, wherein the dsRNA agent is administered to the subject subcutaneously.

71.-76. (canceled)

77. A kit, a vial, or a syringe comprising the dsRNA agent of claim 1.

78. (canceled)

79. (canceled)
